(19) United States
(12) Patent Application Publication
(10) Pub. No.: US 2002/0094953 A1
(43) Pub. Date: Jul. 18, 2002

(54) Nucleic acids, proteins, and antibodies

(76) Inventors: Craig A. Rosen, Laytonsville, MD (US); Steven M. Ruben, Olney, MD (US); Steven C. Barash, Rockville, MD (US)

Correspondence Address: HUMAN GENOME SCIENCES INC, 9410 KEY WEST AVENUE, ROCKVILLE, MD, 20850

(21) Appl. No.: 09/764,860

(22) Filed: Jan. 17, 2001

Related U.S. Application Data
(60) Provisional application No. 60/179,065, filed on Jan. 31, 2000.
(60) Provisional application No. 60/180,628, filed on Feb. 4, 2000.
(60) Provisional application No. 60/214,886, filed on Jun. 28, 2000.
(60) Provisional application No. 60/217,487, filed on Jul. 11, 2000.
(60) Provisional application No. 60/225,758, filed on Aug. 14, 2000.
(60) Provisional application No. 60/220,963, filed on Jul. 26, 2000.
(60) Provisional application No. 60/217,496, filed on Jul. 11, 2000.
(60) Provisional application No. 60/225,447, filed on Aug. 14, 2000.
(60) Provisional application No. 60/218,290, filed on Jul. 14, 2000.
(60) Provisional application No. 60/225,757, filed on Aug. 14, 2000.
(60) Provisional application No. 60/226,868, filed on Aug. 22, 2000.
(60) Provisional application No. 60/216,647, filed on Jul. 7, 2000.
(60) Provisional application No. 60/225,267, filed on Aug. 14, 2000.
(60) Provisional application No. 60/216,880, filed on Jul. 7, 2000.
(60) Provisional application No. 60/225,270, filed on Aug. 14, 2000.
(60) Provisional application No. 60/251,869, filed on Dec. 8, 2000.
(60) Provisional application No. 60/235,834, filed on Sep. 27, 2000.
(60) Provisional application No. 60/234,274, filed on Sep. 21, 2000.
(60) Provisional application No. 60/234,223, filed on Sep. 21, 2000.
(60) Provisional application No. 60/228,924, filed on Aug. 30, 2000.
(60) Provisional application No. 60/224,518, filed on Aug. 14, 2000.
(60) Provisional application No. 60/236,369, filed on Sep. 29, 2000.
(60) Provisional application No. 60/224,519, filed on Aug. 14, 2000.
(60) Provisional application No. 60/220,964, filed on Jul. 26, 2000.
(60) Provisional application No. 60/241,809, filed on Oct. 20, 2000.
(60) Provisional application No. 60/249,299, filed on Nov. 17, 2000.
(60) Provisional application No. 60/236,327, filed on Sep. 29, 2000.
(60) Provisional application No. 60/241,785, filed on Oct. 20, 2000.
(60) Provisional application No. 60/244,617, filed on Nov. 1, 2000.
(60) Provisional application No. 60/225,268, filed on Aug. 14, 2000.
(60) Provisional application No. 60/236,368, filed on Sep. 29, 2000.
(60) Provisional application No. 60/251,856, filed on Dec. 8, 2000.
(60) Provisional application No. 60/251,868, filed on Dec. 8, 2000.
(60) Provisional application No. 60/229,344, filed on Sep. 1, 2000.
(60) Provisional application No. 60/234,997, filed on Sep. 25, 2000.
(60) Provisional application No. 60/229,343, filed on Sep. 1, 2000.
(60) Provisional application No. 60/229,345, filed on Sep. 1, 2000.
(60) Provisional application No. 60/229,287, filed on Sep. 1, 2000.
(60) Provisional application No. 60/229,513, filed on Sep. 5, 2000.
(60) Provisional application No. 60/231,413, filed on Sep. 8, 2000.
(60) Provisional application No. 60/229,509, filed on Sep. 5, 2000.
(60) Provisional application No. 60/236,367, filed on Sep. 29, 2000.
(60) Provisional application No. 60/237,039, filed on Oct. 2, 2000.
(60) Provisional application No. 60/237,038, filed on Oct. 2, 2000.
(60) Provisional application No. 60/236,370, filed on Sep. 29, 2000.
(60) Provisional application No. 60/236,802, filed on Oct. 2, 2000.
(60) Provisional application No. 60/237,037, filed on Oct. 2, 2000.
(60) Provisional application No. 60/237,040, filed on Oct. 2, 2000.
(60) Provisional application No. 60/240,960, filed on Oct. 20, 2000.
(60) Provisional application No. 60/239,935, filed on Oct. 13, 2000.

(51) Int. Cl. A61K 38/17; C07H 21/04; C12N 9/00; C12P 21/02; C12N 5/06

(52) U.S. Cl. 514/12; 435/69.1; 435/320.1; 536/23.1; 435/183; 435/325

(57) ABSTRACT

The present invention relates to novel respiratory system related polynucleotides and the polypeptides encoded by these polynucleotides herein collectively known as “respiratory system antigens,” and the use of such respiratory system antigens for detecting disorders of the respiratory system, particularly the presence of cancer of respiratory system tissues and cancer metastases. More specifically, isolated respiratory system associated nucleic acid molecules are provided encoding novel respiratory system associated polypeptides. Novel respiratory system polypeptides and antibodies that bind to these polypeptides are provided. Also provided are vectors, host cells, and recombinant and synthetic methods for producing human respiratory system associated polynucleotides and/or polypeptides. The invention further relates to diagnostic and therapeutic methods useful for diagnosing, treating, preventing and/or prognosing disorders related to the respiratory system, including cancer of respiratory system tissues, and therapeutic methods for treating such disorders. The invention further relates to screening methods for identifying agonists and antagonists of polynucleotides and polypeptides of the invention. The present invention further relates to methods and/or compositions for inhibiting the production and function of the polypeptides of the present invention.

### STATEMENT UNDER 37 C.F.R. §1.77(b)(4)

[0001] This application refers to a “Sequence Listing” listed below, which is provided as an electronic document on two identical compact discs (CD-R), labeled “Copy 1” and “Copy 2.” These compact discs each contain the following files, which are hereby incorporated in their entirety herein:

| Document | File Name | Size in bytes | Date of Creation |
|---|---|---|---|
| Sequence Listing | PC008_seqList.txt | 2,230,692 | 01/15/2001 |
| V Viewer Setup File | SetupDLL.exe | 695,808 | 12/19/2000 |
| V Viewer Help File Controller | v.cnt | 7,984 | 01/05/2001 |
| V Viewer Program File | v.exe | 753,664 | 12/19/2000 |
| V Viewer Help File | v.hlp | 447,766 | 01/05/2001 |

[0002] The Sequence Listing may be viewed on an IBM-PC machine running the MS-Windows operating system by using the V viewer software, licensed by HGS, Inc., included on the compact discs (see World Wide Web URL: http://www.fileviewer.com).

[0003] 1. Field of the Invention

[0004] The present invention relates to novel respiratory system related polynucleotides, the polypeptides encoded by these polynucleotides herein collectively referred to as “respiratory system antigens,” and antibodies that immunospecifically bind these polypeptides, and the use of such respiratory system polynucleotides, antigens, and antibodies for detecting, treating, preventing and/or prognosing disorders of the respiratory system, including, but not limited to, the presence of cancer of respiratory system tissues and cancer metastases. More specifically, isolated respiratory system nucleic acid molecules are provided encoding novel respiratory system polypeptides. Novel respiratory system polypeptides and antibodies that bind to these polypeptides are provided. Also provided are vectors, host cells, and recombinant and synthetic methods for producing human respiratory system polynucleotides, polypeptides, and/or antibodies. The invention further relates to diagnostic and therapeutic methods useful for diagnosing, treating, preventing and/or prognosing disorders related to the respiratory system, including cancer of respiratory system tissues, and therapeutic methods for treating such disorders. The invention further relates to screening methods for identifying agonists and antagonists of polynucleotides and polypeptides of the invention. The invention further relates to methods and/or compositions for inhibiting or promoting the production and/or function of the polypeptides of the invention.

[0005] 2. Background of the Invention

[0006] The respiratory system is a collection of specialized organs and body tissues whose primary functions are to bring oxygen into the lungs, transfer the oxygen to the blood, and expel the waste product, carbon dioxide. The respiratory system (the respiratory tract) is composed of the nose, throat, (larynx, pharynx, trachea, epiglottis) and the lungs. Inhaled oxygen which enters the body through the mouth and nose, is warmed, filtered, and passed through the nasal cavity. Air then passes to the pharynx, which consists of an upper part—nasopharynx, a middle part—oropharynx, and a lower part—hypopharynx. The pharynx has the epiglottis that prevents food from entering the trachea. The upper part of the trachea contains the larynx (voice box). After passing the larynx, the air enters the lungs and passes into the two main bronchi, each of which supplies one lung. The right and left main bronchi divide repeatedly into smaller and smaller branches (bronchioles) as they progress more deeply into the lungs. The bronchioles ultimately carry air to and from the clusters of air sacs (alveoli), where the exchange of oxygen and carbon dioxide takes place. The walls of the alveoli and of the surrounding capillaries are only one cell thick and are in very close contact with each other. Oxygen passes easily through the thin walls of the alveoli and into the blood in the capillaries, and carbon dioxide passes from the blood into the alveoli and is exhaled through the nose and mouth. Oxygenated blood travels from the lungs through the pulmonary veins and into the left side of the heart, which pumps the blood to the rest of the body. Oxygen-depleted, carbon dioxide-rich blood returns to the right side of the heart through two large veins, the superior and inferior vena cava, and is pumped through the pulmonary artery to the lungs, where it picks up oxygen and releases carbon dioxide.

[0007] Common respiratory system disorders including infections, inflammations, ulcers and cancers of the respiratory tract. Disorders and diseases of the specific organs of the respiratory tract are described in more detail below.

[0008] Disease and Disorders of the Throat (e.g., Pharynx, Larynx, Tonsils, Epiglottis)

[0009] Cancer of the upper part of the pharynx (nasopharynx) may occur in children and young adults. Although rare in North America, it's one of the most common cancers in the Orient. It's also more common in Chinese who have immigrated to North America than in other Americans and slightly less common in American-born Chinese than in their immigrant parents. The Epstein-Barr virus, which causes infectious mononucleosis, also plays a role in the development of nasopharyngeal cancer. Often, the first symptom is persistent blockage of the nose or eustachian tubes. If a eustachian tube is blocked, fluid may accumulate in the middle ear. A person may have a discharge of pus and blood from the nose and nosebleeds. The cancer may spread to lymph nodes in the neck. A biopsy is usually performed for diagnoses of the tumor. The tumor is treated with radiation therapy. If the tumor is large or persists, surgery may be needed. Overall, 35 percent of the people survive for at least 5 years after diagnosis.

[0010] Cancer of the tonsil occurs predominantly in men and is strongly linked to smoking and alcohol consumption. Usually, a sore throat is the first symptom. Pain often radiates to the ear on the same side as the affected tonsil. Sometimes, however, a lump in the neck resulting from the cancer's spread to a lymph node (metastasis) may be noticed before any other symptoms. Treatment includes both radiation therapy and surgery. Surgery may involve removal of the tumor, lymph nodes in the neck, and part of the jaw. About 50 percent of the people survive for at least 5 years after diagnosis.

[0011] Cancer of the larynx, the most common cancer of the head and neck except for skin cancer, is more common in men and is linked to cigarette smoking and alcohol consumption. This cancer commonly originates on the vocal cords, causing hoarseness. Cancer in other parts of the larynx causes pain and difficulty in swallowing. Sometimes, however, a lump in the neck resulting from the cancer's spread to a lymph node (metastasis) may be noticed before any other symptoms. Treatment depends on the precise location of the cancer within the larynx. For cancer in an early stage, surgery or radiation therapy is the usual treatment. When the vocal cords are affected, radiation therapy is often preferred because it usually preserves the normal voice. For cancer in an advanced stage, the usual treatment is surgery, which can include removing part or all of the larynx (partial or total laryngectomy), often followed by radiation therapy. When treated, 90 percent of people who have cancer in stage I survive for at least 5 years, compared with 25 percent of those who have cancer in stage IV.

[0012] Despite the advances made in the area of throat cancer, there remains a need for a practical method to diagnose throat cancer as close to its inception as possible. In order for early detection to be feasible, it is important that specific markers be found and their sequences elucidated.

[0013] Vocal cord paralysis is the inability to move the muscles that control the vocal cords. Vocal cord paralysis may result from brain disorders, such as brain tumors, strokes, and demyelinating diseases or damage to the nerves leading to the larynx. Nerve damage may be caused by tumors, injury, a viral infection of the nerves, or neurotoxins (substances that poison or destroy nerve tissue) such as lead or the toxins produced in diphtheria.

[0014] Disease and disorders of the throat also include, but are not limited to, vocal cord polyps, nodules (singer's nodules), contact ulcers, vocal cord paralysis, laryngoceles, pharyngitis (e.g., viral and bacterial), tonsillitis, tonsillar cellulitis, parapharyngeal abscess, laryngitis, and laryngoceles.

[0015] Disease and Disorders of the Lung

[0016] Lung cancer (e.g., squamous cell carcinoma, small cell (oat cell) carcinoma, large cell carcinoma, and adenocarcinoma) is the most common form of cancer in the world. Typical diagnosis of lung cancer combines x-ray with sputum cytology. Unfortunately, by the time a patient seeks medical attention for their symptoms, the cancer is at such an advanced state it is usually incurable. Consequently, research has been focused on early detection of tumor markers before the cancer becomes clinically apparent and while the cancer is still localized and amenable to therapy. The World Health Organization has classified lung cancer into four major histological or morphological types: (1) squamous cell carcinoma, (2) adenocarcinoma, (3) large cell carcinoma, and (4) small cell lung carcinoma. (World Health Organization. 1982. “The World Health Organization Histological Typing of Lung Tumors,” Am J Clin Pathol 77:123-136). Particular interest has been given to the identification of antigens associated with lung cancer. These antigens have been used in screening, diagnosis, clinical management, and potential treatment of lung cancer. There is also a continuing need to identify specific antigens associated with lung cancer and to generate monoclonal antibodies (MAb) to these antigens for the development of tools for diagnosing cancer, targeting of drugs and other treatments to particular sites in the body, imaging of tumors for radiotherapy, and possible generating therapeutic agents for cancer. Despite all of the advances made in the area of lung cancer, medical and surgical intervention has resulted in little change in the 5-year survival rate for lung cancer patients. Early detection holds the greatest hope for successful intervention. There remains a need for a practical method to diagnose lung cancer as close to its inception as possible. In order for early detection to be feasible, it is important that specific markers be found and their sequences elucidated.

[0017] The lungs are particularly prone to allergic reactions because they're exposed to large quantities of airborne antigens, including dusts, pollens, and chemicals. Allergic reactions are classified by the type of tissue damage that develops. Many allergic reactions are a mixture of more than one type of tissue damage. Some allergic reactions involve antigen-specific lymphocytes (a type of white blood cell) rather than antibodies. Allergic disorders may include eosinophilic pneumonia, hypersensitivity pneumonitis (e.g., extrinsic allergic alveolitis, allergic interstitial pneumonitis, organic dust pneumoconiosis, allergic bronchopulmonary aspergillosis, asthma, Wegener's granulomatosis (granulomatous vasculitis), Goodpasture's syndrome)).

[0018] Pneumonia is an infection of the lungs that involves the small air sacs (alveoli) and the tissues around them. In the United States, about 2 million people develop pneumonia each year, and 40,000 to 70,000 of them die. Often, pneumonia is the final illness in people who have other serious, chronic diseases. It's the sixth most common cause of death overall, and the most common fatal infection acquired in hospitals.

[0019] Pneumonia can be caused by bacterial viral, and/or fungal infections. For example, bacterial causes of pneumonia include Streptococcus pneumoniae (pneumoncoccal pneumonia), Staphylococcus aureus (staphylococcal pneumonia), Gram-negative bacterial pneumonia (caused by, e.g., Klebsiella and Pseudomas spp.), Mycoplasma pneumoniae pneumonia, Hemophilus influenzae pneumonia, Legionella pneumophila (Legionnaires' disease), and Chlamydia psittaci (Psittacosis)). For example, viral pneumonias include influenza, chickenpox (varicella), bronchiolitis, polio (poliomyelitis), croup, respiratory syncytial viral infection, mumps, erythema infectiosum (fifth disease), roseola infantum, progressive rubella panencephalitis, german measles, and subacute sclerosing panencephalitis. For example, fungal pneumonias include Histoplasmosis, Coccidioidomycosis, Blastomycosis, and fungal infections in people with severely suppressed immune systems (e.g., cryptococcosis, caused by Cryptococcus neoformans; aspergillosis, caused by Aspergillus spp.; candidiasis, caused by Candida; and mucormycosis)), Pneumocystis carinii (pneumocystis pneumonia). Pneumonias also include atypical pneumonias (e.g., Mycoplasma and Chlamydia spp.), opportunistic infection pneumonia, nosocomial pneumonia, chemical pneumonitis, and aspiration pneumonia.

[0020] The pleura is a thin, transparent membrane that covers the lungs and also lines the inside of the chest wall. The surface that covers the lungs lies in close contact with the surface that lines the chest wall. Between the two thin flexible surfaces is a small amount of fluid that lubricates them as they slide smoothly over one another with each breath. Air, blood, fluid, or other material can get between the pleural surfaces, creating a space. If too much material accumulates, one or both lungs may not be able to expand normally with breathing, resulting in the collapse of a lung. Pleurisy is an inflammation of the pleura. Pleurisy develops when an agent (usually a virus or bacterium) irritates the pleura, resulting in inflammation. Fluid may accumulate in the pleural space (a condition called pleural effusion), or fluid may not accumulate (a condition called dry pleurisy). After the inflammation subsides, the pleura may return to normal, or adhesions may form that make the pleural layers stick together. Pleural disorders may include, for example, pleurisy, pleural effusion, and pneumothorax (e.g., simple spontaneous pneumothorax, complicated spontaneous pneumothorax, tension pneumothorax)).

[0021] Cystic fibrosis is a hereditary disease that causes certain glands to produce abnormal secretions, resulting in several symptoms, the most important of which affect the digestive tract and the lungs. Cystic fibrosis is the most common inherited disease leading to death among white people in the United States. It occurs in 1 of every 2,500 white babies and in 1 of every 17,000 black babies. Many people with cystic fibrosis die young, but 35 percent of Americans with cystic fibrosis reach adulthood. Cystic fibrosis affects nearly all the exocrine glands, disrupting the regulation of the transfer of chloride and sodium (salt) across cell membranes. In people with Cystic Fibrosis mucus-producing glands in the airways of the lungs produce abnormal secretions that clog the airways and allow bacteria to multiply. The secretions are abnormal in different ways, and they affect gland function. In some glands, such as the pancreas and those in the intestines, the secretions are thick or solid and may block the gland completely. The sweat glands, parotid glands, and small salivary glands secrete fluids containing more salt than normal. Many people with CF require frequent hospitalizations and continuous use of antibiotics, enzyme supplements, and other medications.

[0022] Despite progress in therapy, cystic fibrosis remains a lethal disease, and no current therapy treats the basic defect. Since the most life threatening manifestations of CF involve pulmonary complications, epithelial cells of the upper airways are appropriate target cells for therapy.

[0023] Asthma is a condition in which the airways are narrowed because hyperreactivity to certain stimuli produces inflammation; the airway narrowing is reversible. Asthma affects about 10 million Americans and is becoming more common. In a person with asthma, the airways narrow in response to stimuli that don't affect the airways in normal lungs. The narrowing can be triggered by many stimuli, such as pollens, dust mites, animal dander, smoke, cold air, and exercise. In an asthma attack, the smooth muscles of the bronchi go into spasm, and the tissues lining the airways swell from inflammation and secrete mucus into the airways. These actions narrow the diameter of the airways (a condition called bronchoconstriction); the narrowing requires the person to exert more effort to move air in and out. Certain cells in the airway, particularly the mast cells, are thought to be responsible for initiating the airway narrowing. Mast cells throughout the bronchi release substances such as histamine and leukotrienes that cause smooth muscle to contract, mucus secretion to increase, and certain white blood cells to migrate to the area. Mast cells can be triggered to release these substances in response to something they recognize as foreign (an allergen), such as pollen, house dust mites, or animal dander. However, asthma is also common and severe in many people without defined allergies. Stress and anxiety also can trigger mast cells to release histamine and leukotrienes. Eosinophils, another type of cell found in the airways of people with asthma, release additional substances including leukotrienes and other materials, contributing to airway narrowing.

[0024] Obstructive airway diseases include, for example, asthma, chronic obstructive pulmonary disease (COPD), emphysema, chronic or acute bronchitis), occupational lung diseases (e.g., silicosis, black lung (coal workers' pneumoconiosis), asbestosis, berylliosis, occupational asthsma, byssinosis, and benign pneumoconioses), Infiltrative Lung Disease (e.g., pulmonary fibrosis (e.g., fibrosing alveolitis, usual interstitial pneumonia), idiopathic pulmonary fibrosis, desquamative interstitial pneumonia, and lymphoid interstitial pneumonia.

[0025] Histiocytosis X is a group of disorders (Letterer-Siwe disease, Hand-Schüller-Christian disease, eosinophilic granuloma) in which abnormal scavenger cells called histiocytes and another immune system cell type called eosinophils proliferate, especially in the bone and lung, often causing scars toform. Letterer-Siwe disease starts before age 3 and is usually fatal without treatment. The histiocytes damage not only the lungs but also the skin, lymph glands, bone, liver, and spleen. Collapse of a lung (pneumothorax) may occur. Hand-Schüller-Christian disease usually begins in early childhood but can start in late middle age. The lungs and bones are most frequently affected. Rarely, damage to the pituitary gland causes bulging eyes (exophthalmos) and diabetes insipidus, a condition in which large quantities of urine are produced, leading to dehydration. Eosinophilic granuloma tends to start between ages 20 and 40. It usually affects the bones but also affects the lungs in 20 percent of people; sometimes only the lungs are involved. When the lungs are affected, the symptoms can include coughing, shortness of breath, fever, and weight loss, but some people have no symptoms. Collapse of a lung (pneumothorax) is a common complication. People with Hand-Schüller-Christian disease or eosinophilic granuloma may recover spontaneously. All three disorders may be treated with corticosteroids and cytotoxic drugs such as cyclophosphamide, although no therapy is clearly beneficial. The therapy for bone involvement is similar to that for bone tumors. Death usually results from respiratory failure or heart failure.

[0026] Sarcoidosis is a disease in which abnormal collections of inflammatory cells (granulomas) form in many organs of the body. Pulmonary alveolar proteinosis is a rare disease in which the air sacs of the lungs (alveoli) become plugged with a protein-rich fluid. Idiopathic pulmonary hemosiderosis (iron in the lungs) is a rare, often fatal, disease in which blood leaks from the capillaries into the lungs for unknown reasons.

[0027] Disease and disorders of the lung also include, but are not limited to, Acute respiratory distress syndrome (also called, e.g., adult respiratory distress syndrome), edema, pulmonary embolism, bronchitis (e.g., viral, bacterial), bronchiectasis, atelectasis, and lung abscess (caused by, e.g., Staphylococcus aureus or Legionella pneumophila).

[0028] Disease and Disorders of the Nose

[0029] Disease and disorders of the nose include, but are not limited to, nasal vestibulitis, nonallergic rhinitis (e.g., acute rhinitis, chronic rhinitis, atrophic rhinitis, vasomotor rhinitis), nasal polyps, and sinusitis, juvenile angiofibromas, cancer of the nose and juvenile papillomas.

[0030] The discovery of new human respiratory system associated polynucleotides, the polypeptides encoded by them, and antibodies that immunospecifically bind these polypeptides, satisfies a need in the art by providing new compositions which are useful in the diagnosis, treatment, prevention and/or prognosis of disorders of respiratory system, particularly disorders of the respiratory system, including, but not limited to, throat disorders (e.g., vocal cord paralysis, tonsillitis, and larynigitis), lung disorders (e.g., pneumonia, allegeric disorders (e.g., asthma and eosionphilic pheumonia), pleurisy, cystic fibrosis, emphysema, histiocytosis X, and sarcoidosis), nose disorders (rhinitis and sinusitis), neoplasms and/or cancers of respiratory tissues (e.g., throat cancer, lung cancer, and cancer of the nose), and/or as described under “Respiratory Disorders” below.

### SUMMARY OF THE INVENTION

[0031] The present invention relates to novel respiratory system related polynucleotides, the polypeptides encoded by these polynucleotides herein collectively referred to as “respiratory system antigens,” and antibodies that immunospecifically bind these polypeptides, and the use of such respiratory system polynucleotides, antigens, and antibodies for detecting, treating, preventing and/or prognosing disorders of the respiratory system, including, but not limited to, the presence of cancer of respiratory system tissues and cancer metastases. More specifically, isolated respiratory system nucleic acid molecules are provided encoding novel respiratory system polypeptides. Novel respiratory system polypeptides and antibodies that bind to these polypeptides are provided. Also provided are vectors, host cells, and recombinant and synthetic methods for producing human respiratory system polynucleotides, polypeptides, and/or antibodies. The invention further relates to diagnostic and therapeutic methods useful for diagnosing, treating, preventing and/or prognosing disorders related to the respiratory system, including cancer of respiratory system tissues, and therapeutic methods for treating such disorders. The invention further relates to screening methods for identifying agonists and antagonists of polynucleotides and polypeptides of the invention. The invention further relates to methods and/or compositions for inhibiting or promoting the production and/or function of the polypeptides of the invention.

### DETAILED DESCRIPTION

[0032] Tables

[0033] Table 1A summarizes some of the polynucleotides encompassed by the invention (including cDNA clones related to the sequences (Clone ID NO:Z), contig sequences (contig identifier (Contig ID:) and contig nucleotide sequence identifier (SEQ ID NO:X)) and further summarizes certain characteristics of these polynucleotides and the polypeptides encoded thereby. The first column provides a unique clone identifier, “Clone ID NO:Z”, for a cDNA plasmid related to each respiratory system associated contig sequence disclosed in Table 1A. The second column provides a unique contig identifier, “Contig ID:” for each of the contig sequences disclosed in Table 1A. The third column provides the sequence identifier, “SEQ ID NO:X”, for each of the contig polynucleotide sequences disclosed in Table 1A. The fourth column, “ORF (From-To)”, provides the location (i.e., nucleotide position numbers) within the polynucleotide sequence of SEQ ID NO:X that delineate the preferred open reading frame (ORF) shown in the sequence listing and referenced in Table 1A as SEQ ID NO:Y (column 5). Column 6 lists residues comprising predicted epitopes contained in the polypeptides encoded by each of the preferred ORFs (SEQ ID NO:Y). Identification of potential immunogenic regions was performed according to the method of Jameson and Wolf (CABIOS, 4:181-186 (1988)); specifically, the Genetics Computer Group (GCG) implementation of this algorithm, embodied in the program PEPTIDESTRUCTURE (Wisconsin Package v10.0, Genetics Computer Group (GCG), Madison, Wis.). This method returns a measure of the probability that a given residue is found on the surface of the protein. Regions where the antigenic index score is greater than 0.9 over at least 6 amino acids are indicated in Table 1A as “Predicted Epitopes.” In particular embodiments, respiratory system associated polypeptides of the invention comprise, or alternatively consist of, one, two, three, four, five or more of the predicted epitopes described in Table 1A. It will be appreciated that depending on the analytical criteria used to predict antigenic determinants, the exact address of the determinant may vary slightly. Column 7, “Tissue Distribution” shows the expression profile of tissue, cells, and/or cell line libraries which express the polynucleotides of the invention. The first number in column 7 (preceding the colon), represents the tissue/cell source identifier code corresponding to the code and description provided in Table 4. Expression of these polynucleotides was not observed in the other tissues and/or cell libraries tested. For those identifier codes in which the first two letters are not “AR”, the second number in column 7 (following the colon), represents the number of times a sequence corresponding to the reference polynucleotide sequence (e.g., SEQ ID NO:X) was identified in the tissue/cell source. Those tissue/cell source identifier codes in which the first two letters are “AR” designate information generated using DNA array technology. Utilizing this technology, cDNAs were amplified by PCR and then transferred, in duplicate, onto the array. Gene expression was assayed through hybridization of first strand cDNA probes to the DNA array. cDNA probes were generated from total RNA extracted from a variety of different tissues and cell lines. Probe synthesis was performed in the presence of ³³P dCTP, using oligo(dT) to prime reverse transcription. After hybridization, high stringency washing conditions were employed to remove non-specific hybrids from the array. The remaining signal, emanating from each gene target, was measured using a Phosphorimager. Gene expression was reported as Phosphor Stimulating Luminescence (PSL) which reflects the level of phosphor signal generated from the probe hybridized to each of the gene targets represented on the array. A local background signal subtraction was performed before the total signal generated from each array was used to normalize gene expression between the different hybridizations. The value presented after “[array code]:” represents the mean of the duplicate values, following background subtraction and probe normalization. One of skill in the art could routinely use this information to identify normal and/or diseased tissue(s) which show a predominant expression pattern of the corresponding polynucleotide of the invention or to identify polynucleotides which show predominant and/or specific tissue and/or cell expression. Column 8, “Cytologic Band,” provides the chromosomal location of polynucleotides corresponding to SEQ ID NO:X. Chromosomal location was determined by finding exact matches to EST and cDNA sequences contained in the NCBI (National Center for Biotechnology Information) UniGene database. Given a presumptive chromosomal location, disease locus association was determined by comparison with the Morbid Map, derived from Online Mendelian Inheritance in Man (Online Mendelian Inheritance in Man, OMIM™. McKusick-Nathans Institute for Genetic Medicine, Johns Hopkins University (Baltimore, Md.) and National Center for Biotechnology Information, National Library of Medicine (Bethesda, Md.) 2000. World Wide Web URL: http://www.ncbi.nlm.nih.gov/omim/). If the putative chromosomal location of the Query overlapped with the chromosomal location of a Morbid Map entry, an OMIM identification number is provided in Table 1A, column 9 labeled “OMIM Disease Reference(s)”. A key to the OMIM reference identification numbers is provided in Table 5.

[0034] Table 1B summarizes additional polynucleotides encompassed by the invention (including cDNA clones related to the sequences (Clone ID NO:Z), contig sequences (contig identifier (Contig ID:) contig nucleotide sequence identifiers (SEQ ID NO:X)), and genomic sequences (SEQ ID NO:B). The first column provides a unique clone identifier, “Clone ID NO:Z”, for a cDNA clone related to each contig sequence. The second column provides the sequence identifier, “SEQ ID NO:X”, for each contig sequence. The third column provides a unique contig identifier, “Contig ID:” for each contig sequence. The fourth column, provides a BAC identifier “BAC ID NO:A” for the BAC clone referenced in the corresponding row of the table. The fifth column provides the nucleotide sequence identifier, “SEQ ID NO:B” for a fragment of the BAC clone identified in column four of the corresponding row of the table. The sixth column, “Exon From-To”, provides the location (i.e., nucleotide position numbers) within the polynucleotide sequence of SEQ ID NO:B which delineate certain polynucleotides of the invention that are also exemplary members of polynucleotide sequences that encode polypeptides of the invention (e.g., polypeptides containing amino acid sequences encoded by the polynucleotide sequences delineated in column six, and fragments and variants thereof).

[0035] Table 2 summarizes homology and features of some of the polypeptides of the invention. The first column provides a unique clone identifier, “Clone ID NO:Z”, corresponding to a cDNA disclosed in Table 1A. The second column provides the unique contig identifier, “Contig ID:” corresponding to contigs in Table 1A and allowing for correlation with the information in Table 1A. The third column provides the sequence identifier, “SEQ ID NO:X”, for the contig polynucleotide sequences. The fourth column provides the analysis method by which the homology/identity disclosed in the row was determined. Comparisons were made between polypeptides encoded by the polynucleotides of the invention and either a non-redundant protein database (herein referred to as “NR”), or a database of protein families (herein referred to as “PFAM”) as further described below. The fifth column provides a description of PFAM/NR hits having significant matches to a polypeptide of the invention. Column six provides the accession number of the PFAM/NR hit disclosed in the fifth column. Column seven, “Score/Percent Identity”, provides a quality score or the percent identity, of the hit disclosed in column five. Columns 8 and 9, “NT From” and “NT To” respectively, delineate the polynucleotides in “SEQ ID NO:X” that encode a polypeptide having a significant match to the PFAM/NR database as disclosed in the fifth column. In specific embodiments, polypeptides of the invention comprise, or alternatively consist of, an amino acid sequence encoded by the polynucleotides in SEQ ID NO:X as delineated in columns 8 and 9, or fragments or variants thereof.

[0036] Table 3 provides polynucleotide sequences that may be disclaimed according to certain embodiments of the invention. The first column provides a unique clone identifier, “Clone ID NO:Z”, for a cDNA clone related to respiratory system associated contig sequences disclosed in Table 1A. The second column provides the sequence identifier, “SEQ ID NO:X”, for contig polynucleotide sequences disclosed in Table 1A. The third column provides the unique contig identifier, “Contig ID”, for contigs disclosed in Table 1A. The fourth column provides a unique integer ‘a’ where ‘a’ is any integer between 1 and the final nucleotide minus 15 of SEQ ID NO:X, represented as “Range of a”, and the fifth column provides a unique integer ‘b’ where ‘b’ is any integer between 15 and the final nucleotide of SEQ ID NO:X, represented as “Range of b”, where both a and b correspond to the positions of nucleotide residues shown in SEQ ID NO:X, and where b is greater than or equal to a+14. For each of the polynucleotides shown as SEQ ID NO:X, the uniquely defined integers can be substituted into the general formula of a-b, and used to describe polynucleotides which may be preferably excluded from the invention. In certain embodiments, preferably excluded from the polynucleotides of the invention (including polynucleotide fragments and variants as described herein and diagnostic and/or therapeutic uses based on these polynucleotides) are at least one, two, three, four, five, ten, or more of the polynucleotide sequence(s) having the accession number(s) disclosed in the sixth column of this Table (including for example, published sequence in connection with a particular BAC clone). In further embodiments, preferably excluded from the invention are the specific polynucleotide sequence(s) contained in the clones corresponding to at least one, two, three, four, five, ten, or more of the available material having the accession numbers identified in the sixth column of this Table (including for example, the actual sequence contained in an identified BAC clone).

[0037] Table 4 provides a key to the tissue/cell source identifier code disclosed in Table 1A, column 7. Column 1 provides the key to the tissue/cell source identifier code disclosed in Table 1A, Column 7. Columns 2-5 provide a description of the tissue or cell source. Codes corresponding to diseased tissues are indicated in column 6 with the word “disease”. The use of the word “disease” in column 6 is non-limiting. The tissue or cell source may be specific (e.g. a neoplasm), or may be disease-associated (e.g., a tissue sample from a normal portion of a diseased organ). Furthermore, tissues and/or cells lacking the “disease” designation may still be derived from sources directly or indirectly involved in a disease state or disorder, and therefore may have a further utility in that disease state or disorder. In numerous cases where the tissue/cell source is a library, column 7 identifies the vector used to generate the library.

[0038] Table 5 provides a key to the OMIM™ reference identification numbers disclosed in Table 1A, column 9. OMIM reference identification numbers (Column 1) were derived from Online Mendelian Inheritance in Man (Online Mendelian Inheritance in Man, OMIM™. McKusick-Nathans Institute for Genetic Medicine, Johns Hopkins University (Baltimore, Md.) and National Center for Biotechnology Information, National Library of Medicine, (Bethesda, Md.) 2000. World Wide Web URL: http://www.ncbi.nlm.nih.gov/omim/). Column 2 provides diseases associated with the cytologic band disclosed in Table 1A, column 8, as determined from the Morbid Map database.

[0039] Table 6 summarizes ATCC Deposits, Deposit dates, and ATCC designation numbers of deposits made with the ATCC in connection with the present application.

[0040] Table 7 shows the cDNA libraries sequenced, tissue source description, vector information and ATCC designation numbers relating to these cDNA libraries.

[0041] Table 8 provides a physical characterization of clones encompassed by the invention. The first column provides the unique clone identifier, “Clone ID NO:Z”, for certain cDNA clones of the invention, as described in Table 1A. The second column provides the size of the cDNA insert contained in the corresponding cDNA clone.

[0042] Definitions

[0043] The following definitions are provided to facilitate understanding of certain terms used throughout this specification.

[0044] In the present invention, “isolated” refers to material removed from its original environment (e.g., the natural environment if it is naturally occurring), and thus is altered “by the hand of man” from its natural state. For example, an isolated polynucleotide could be part of a vector or a composition of matter, or could be contained within a cell, and still be “isolated” because that vector, composition of matter, or particular cell is not the original environment of the polynucleotide. The term “isolated” does not refer to genomic or cDNA libraries, whole cell total or mRNA preparations, genomic DNA preparations (including those separated by electrophoresis and transferred onto blots), sheared whole cell genomic DNA preparations or other compositions where the art demonstrates no distinguishing features of the polynucleotide sequences of the present invention.

[0045] As used herein, a “polynucleotide” refers to a molecule having a nucleic acid sequence encoding SEQ ID NO:Y or a fragment or variant thereof, a nucleic acid sequence contained in SEQ ID NO:X (as described in column 3 of Table 1A) or the complement thereof, a cDNA sequence contained in Clone ID NO:Z (as described in column 1 of Table 1A and contained within a library deposited with the ATCC); a nucleotide sequence encoding the polypeptide encoded by a nucleotide sequence in SEQ ID NO:B as defined in column 6 of Table 1B or a fragment or variant thereof; or a nucleotide coding sequence in SEQ ID NO:B as defined in column 6 of Table 1B or the complement thereof. For example, the polynucleotide can contain the nucleotide sequence of the full length cDNA sequence, including the 5′ and 3′ untranslated sequences, the coding region, as well as fragments, epitopes, domains, and variants of the nucleic acid sequence. Moreover, as used herein, a “polypeptide” refers to a molecule having an amino acid sequence encoded by a polynucleotide of the invention as broadly defined (obviously excluding poly-Phenylalanine or poly-Lysine peptide sequences which result from translation of a polyA tail of a sequence corresponding to a cDNA).

[0046] As used herein, a “respiratory system antigen” refers collectively to any polynucleotide disclosed herein (e.g., a nucleic acid sequence contained in SEQ ID NO:X or the complement therof, or cDNA sequence contained in Clone ID NO:Z, or a nucleotide sequence encoding the polypeptide encoded by a nucleotide sequence in SEQ ID NO:B as defined in column 6 of Table 1B, or a nucleotide coding sequence in SEQ ID NO:B as defined in column 6 of Table 1B or the complement thereof and fragments or variants thereof as described herein) or any polypeptide disclosed herein (e.g., an amino acid sequence contained in SEQ ID NO:Y, an amino acid sequence encoded by SEQ ID NO:X, or the complement thereof, an amino acid sequence encoded by the cDNA sequence contained in Clone ID NO:Z, an amino acid sequence encoded by SEQ ID NO:B, or the complement thereof, and fragments or variants thereof as described herein). These respiratory system antigens have been determined to be predominantly expressed in respiratory system tissues, including normal or diseased tissues (as shown in Table 1A column 7 and Table 4).

[0047] In the present invention, “SEQ ID NO:X” was often generated by overlapping sequences contained in multiple clones (contig analysis). A representative clone containing all or most of the sequence for SEQ ID NO:X is deposited at Human Genome Sciences, Inc. (HGS) in a catalogued and archived library. As shown, for example, in column 1 of Table 1A, each clone is identified by a cDNA Clone ID (identifier generally referred to herein as Clone ID NO:Z). Each Clone ID is unique to an individual clone and the Clone ID is all the information needed to retrieve a given clone from the HGS library. Furthermore, certain clones disclosed in this application have been deposited with the ATCC on Oct. 5, 2000, having the ATCC designation numbers PTA 2574 and PTA 2575; and on Jan. 5, 2001, having the depositor reference numbers TS-1, TS-2, AC-1, and AC-2. In addition to the individual cDNA clone deposits, most of the cDNA libraries from which the clones were derived were deposited at the American Type Culture Collection (hereinafter “ATCC”). Table 7 provides a list of the deposited cDNA libraries. One can use the Clone ID NO:Z to determine the library source by reference to Tables 6 and 7. Table 7 lists the deposited cDNA libraries by name and links each library to an ATCC Deposit. Library names contain four characters, for example, “HTWE.” The name of a cDNA clone (Clone ID NO:Z) isolated from that library begins with the same four characters, for example “HTWEP07”. As mentioned below, Table 1A correlates the Clone ID NO:Z names with SEQ ID NO:X. Thus, starting with an SEQ ID NO:X, one can use Tables 1A, 6 and 7 to determine the corresponding Clone ID NO:Z, which library it came from and which ATCC deposit the library is contained in. Furthermore, it is possible to retrieve a given cDNA clone from the source library by techniques known in the art and described elsewhere herein. The ATCC is located at 10801 University Boulevard, Manassas, Va. 20110-2209, USA. The ATCC deposits were made pursuant to the terms of the Budapest Treaty on the international recognition of the deposit of microorganisms for the purposes of patent procedure.

[0048] In specific embodiments, the polynucleotides of the invention are at least 15, at least 30, at least 50, at least 100, at least 125, at least 500, or at least 1000 continuous nucleotides but are less than or equal to 300 kb, 200 kb, 100 kb, 50 kb, 15 kb, 10 kb, 7.5 kb, 5 kb, 2.5 kb, 2.0 kb, or 1 kb, in length. In a further embodiment, polynucleotides of the invention comprise a portion of the coding sequences, as disclosed herein, but do not comprise all or a portion of any intron. In another embodiment, the polynucleotides comprising coding sequences do not contain coding sequences of a genomic flanking gene (i.e., 5′ or 3′ to the gene of interest in the genome). In other embodiments, the polynucleotides of the invention do not contain the coding sequence of more than 1000, 500, 250, 100, 50, 25, 20, 15, 10, 5, 4, 3, 2, or 1 genomic flanking gene(s).

[0049] A “polynucleotide” of the present invention also includes those polynucleotides capable of hybridizing, under stringent hybridization conditions, to sequences contained in SEQ ID NO:X, or the complement thereof (e.g., the complement of any one, two, three, four, or more of the polynucleotide fragments described herein), the polynucleotide sequence delineated in columns 8 and 9 of Table 2 or the complement thereof, and/or cDNA sequences contained in Clone ID NO:Z (e.g., the complement of any one, two, three, four, or more of the polynucleotide fragments, or the cDNA clone within the pool of cDNA clones deposited with the ATCC, described herein) and/or the polynucleotide sequence delineated in column 6 of Table 1B or the complement thereof. “Stringent hybridization conditions” refers to an overnight incubation at 42 degree C. in a solution comprising 50% formamide, 5×SSC (750 mM NaCl, 75 mM trisodium citrate), 50 mM sodium phosphate (pH 7.6), 5× Denhardt's solution, 10% dextran sulfate, and 20 μg/ml denatured, sheared salmon sperm DNA, followed by washing the filters in 0.1×SSC at about 65 degree C.

[0050] Also contemplated are nucleic acid molecules that hybridize to the polynucleotides of the present invention at lower stringency hybridization conditions. Changes in the stringency of hybridization and signal detection are primarily accomplished through the manipulation of formamide concentration (lower percentages of formamide result in lowered stringency), salt conditions, or temperature. For example, lower stringency conditions include an overnight incubation at 37 degree C. in a solution comprising 6×SSPE (20×SSPE=3M NaCl; 0.2M NaH₂PO₄; 0.02M EDTA, pH 7.4), 0.5% SDS, 30% formamide, 100 ug/ml salmon sperm blocking DNA; followed by washes at 50 degree C. with 1×SSPE, 0.1% SDS. In addition, to achieve even lower stringency, washes performed following stringent hybridization can be done at higher salt concentrations (e.g. 5×SSC).

[0051] Note that variations in the above conditions may be accomplished through the inclusion and/or substitution of alternate blocking reagents used to suppress background in hybridization experiments. Typical blocking reagents include Denhardt's reagent, BLOTTO, heparin, denatured salmon sperm DNA, and commercially available proprietary formulations. The inclusion of specific blocking reagents may require modification of the hybridization conditions described above, due to problems with compatibility.

[0052] Of course, a polynucleotide which hybridizes only to polyA+ sequences (such as any 3′ terminal polyA+ tract of a cDNA shown in the sequence listing), or to a complementary stretch of T (or U) residues, would not be included in the definition of “polynucleotide,” since such a polynucleotide would hybridize to any nucleic acid molecule containing a poly (A) stretch or the complement thereof (e.g., practically any double-stranded cDNA clone generated using oligo dT as a primer).

[0053] The polynucleotide of the present invention can be composed of any polyribonucleotide or polydeoxribonucleotide, which may be unmodified RNA or DNA or modified RNA or DNA. For example, polynucleotides can be composed of single- and double-stranded DNA, DNA that is a mixture of single- and double-stranded regions, single- and double-stranded RNA, and RNA that is mixture of single- and double-stranded regions, hybrid molecules comprising DNA and RNA that may be single-stranded or, more typically, double-stranded or a mixture of single- and double-stranded regions. In addition, the polynucleotide can be composed of triple-stranded regions comprising RNA or DNA or both RNA and DNA. A polynucleotide may also contain one or more modified bases or DNA or RNA backbones modified for stability or for other reasons. “Modified” bases include, for example, tritylated bases and unusual bases such as inosine. A variety of modifications can be made to DNA and RNA; thus, “polynucleotide” embraces chemically, enzymatically, or metabolically modified forms.

[0054] The polypeptide of the present invention can be composed of amino acids joined to each other by peptide bonds or modified peptide bonds, i.e., peptide isosteres, and may contain amino acids other than the 20 gene-encoded amino acids. The polypeptides may be modified by either natural processes, such as posttranslational processing, or by chemical modification techniques which are well known in the art. Such modifications are well described in basic texts and in more detailed monographs, as well as in a voluminous research literature. Modifications can occur anywhere in a polypeptide, including the peptide backbone, the amino acid side-chains and the amino or carboxyl termini. It will be appreciated that the same type of modification may be present in the same or varying degrees at several sites in a given polypeptide. Also, a given polypeptide may contain many types of modifications. Polypeptides may be branched, for example, as a result of ubiquitination, and they may be cyclic, with or without branching. Cyclic, branched, and branched cyclic polypeptides may result from posttranslation natural processes or may be made by synthetic methods. Modifications include acetylation, acylation, ADP-ribosylation, amidation, covalent attachment of flavin, covalent attachment of a heme moiety, covalent attachment of a nucleotide or nucleotide derivative, covalent attachment of a lipid or lipid derivative, covalent attachment of phosphotidylinositol, cross-linking, cyclization, disulfide bond formation, demethylation, formation of covalent cross-links, formation of cysteine, formation of pyroglutamate, formylation, gamma-carboxylation, glycosylation, GPI anchor formation, hydroxylation, iodination, methylation, myristoylation, oxidation, pegylation, proteolytic processing, phosphorylation, prenylation, racemization, selenoylation, sulfation, transfer-RNA mediated addition of amino acids to proteins such as arginylation, and ubiquitination. (See, for instance, PROTEINS—STRUCTURE AND MOLECULAR PROPERTIES, 2nd Ed., T. E. Creighton, W. H. Freeman and Company, New York (1993); POSTTRANSLATIONAL COVALENT MODIFICATION OF PROTEINS, B. C. Johnson, Ed., Academic Press, New York, pgs. 1-12 (1983); Seifter et al., Meth. Enzymol. 182:626-646 (1990); Rattan et al., Ann. N.Y. Acad. Sci. 663:48-62 (1992).)

[0055] “SEQ ID NO:X” refers to a polynucleotide sequence described, for example, in Tables 1A or 2, while “SEQ ID NO:Y” refers to a polypeptide sequence described in column 5 of Table 1A. SEQ ID NO:X is identified by an integer specified in column 3 of Table 1A. The polypeptide sequence SEQ ID NO:Y is a translated open reading frame (ORF) encoded by polynucleotide SEQ ID NO:X. “Clone ID NO:Z” refers to a cDNA clone described in column 1 of Table 1A.

[0056] “A polypeptide having biological activity” refers to a polypeptide exhibiting activity similar to, but not necessarily identical to, an activity of a polypeptide of the present invention, including mature forms, as measured in a particular biological assay, with or without dose dependency. In the case where dose dependency does exist, it need not be identical to that of the polypeptide, but rather substantially similar to the dose-dependence in a given activity as compared to the polypeptide of the present invention (i.e., the candidate polypeptide will exhibit greater activity or not more than about 25-fold less and, preferably, not more than about tenfold less activity, and most preferably, not more than about three-fold less activity relative to the polypeptide of the present invention).

[0057] Table 1A summarizes some of the polynucleotides encompassed by the invention (including contig sequences (SEQ ID NO:X) and clones (Clone ID NO:Z) and further summarizes certain characteristics of these polynucleotides and the polypeptides encoded thereby.

[0058] Polynucleotides and Polypeptides

TABLE 1A

| | | | | AA | | Tissue Distribution | | |
|---|---|---|---|---|---|---|---|---|
| | | | | SEQ | | Library code: count | | OMIM |
| Clone ID | Contig | SEQ ID | ORF | ID | | (see Table IV for | Cytologic | Disease |
| NO: Z | ID: | NO: X | (From-To) | NO: Y | Predicted Epitopes | Library Codes) | Band | References(s): |
| HAAXD06 | 933590 | 11 | 89-3 | 303 | Lys-1 to His-10. | H0654: 2 | | |
| HBHMA28 | 848071 | 12 | 250-459 | 304 | | S0310: 2 | | |
| HBHMB50 | 724019 | 13 | 35-331 | 305 | | S0310: 2 | | |
| HBHME61 | 741527 | 14 | 169-333 | 306 | | S0310: 2 | | |
| HCLCR09 | 963688 | 15 | 80-277 | 307 | Ser-22 to Thr-35. | H0594: 2 | | |
| HCLCW54 | 729100 | 16 | 111-290 | 308 | Glu-33 to Asn-40, | H0594: 2 | | |
| | | | | | Glu-54 to Gln-60. | | | |
| HCLSB28 | 500815 | 17 | 2-157 | 309 | Pro-15 to Lys-22, | H0099: 2 | | |
| | | | | | Gly-44 to Ser-52. | | | |
| HCLSB53 | 612042 | 18 | 146-310 | 310 | Lys-30 to Arg-37. | H0099: 2 | | |
| HCLSC85 | 973802 | 19 | 41-217 | 311 | | H0099: 3 | | |
| HLAAA43 | 714473 | 20 | 1-165 | 312 | Gly-1 to Cys-6, | H0528: 2 | 8q24.2 | 18845O, |
| | | | | | Gln-33 to Arg-40. | | | 18845O, |
| | | | | | | | | 18845O |
| HLFBE35 | 707221 | 21 | 211-357 | 313 | Gln-1 to Leu-9. | T0003: 2 | | |
| HLFBE48 | 722012 | 22 | 167-226 | 314 | Gln-1 to Pro-6. | T0003: 2 | | |
| HLFBH73 | 722010 | 23 | 385-92 | 315 | | T0003: 2 | | |
| HLHAB43 | 714350 | 24 | 198-350 | 316 | Pro-1 to Asp-7, | H0024: 2 and L0005: | | |
| | | | | | Lys-9 to Gly-16, | 1. | | |
| | | | | | Phe-25 to Phe-31. | | | |
| HLHAB50 | 932849 | 25 | 32-172 | 317 | | H0208: 1 and H0024: | | |
| | | | | | | 1. | | |
| HLHAC22 | 766850 | 26 | 95-286 | 318 | Met-4 to Lys-12. | H0024: 2 | 21q21 | 226200, |
| | | | | | | | | 602097 |
| HLHAC31 | 503549 | 27 | 164-310 | 319 | Ser-20 to Glu-28. | H0024: 2 | | |
| HLHAD75 | 503274 | 28 | 112-240 | 320 | Pro-17 to Gly-23. | H0024: 2 | | |
| HLHAD82 | 503280 | 29 | 1-162 | 321 | Thr-6 to Thr-17, | H0208: 1 and H0024: | | |
| | | | | | Gly-19 to Asp-27, | 1. | | |
| | | | | | Tyr-49 to Ser-54. | | | |
| HLHAE04 | 933056 | 30 | 137-427 | 322 | Lys-1 to His-6. | H0024: 2 | | |
| HLHAE29 | 503186 | 31 | 137-220 | 323 | Glu-17 to Gly-28. | H0024: 2 | | |
| HLHAE30 | 857041 | 32 | 11-190 | 324 | | H0024: 2 | | |
| HLHAE35 | 503189 | 33 | 3-146 | 325 | | H0024: 3 | | |
| HLHAE54 | 503264 | 34 | 45-182 | 326 | His-28 to Lys-39. | H0024: 2 | | |
| HLHAH45 | 932843 | 35 | 35-187 | 327 | Lys-1 to Ile-12, | H0024: 2 and H0208: | | |
| | | | | | Glu-14 to Ser-31. | 1. | | |
| HLHAL02 | 921350 | 36 | 1-102 | 328 | | H0024: 2 | | |
| HLHAM69 | 509151 | 37 | 138-266 | 329 | | H0024: 2 and S0005: 1. | | |
| HLHAN75 | 925451 | 38 | 2-385 | 330 | Ser-1 to Tyr-6, | H0024: 2 | | |
| | | | | | Ala-23 to Asn-32, | | | |
| | | | | | Met-41 to Gln-47, | | | |
| | | | | | Ser-49 to Gly-54. | | | |
| HLHAO42 | 509082 | 39 | 40-147 | 331 | Lys-7 to Glu-12, | H0208: 1 and H0024: | | |
| | | | | | Pro-25 to Ser-30. | 1. | | |
| HLHAR25 | 677469 | 40 | 49-279 | 332 | Lys-1 to Arg-6, | H0208: 1 and H0024: | | |
| | | | | | Ser-37 to Gly-42, | 1. | | |
| | | | | | Pro-48 to Gly-58. | | | |
| HLHAS70 | 727840 | 41 | 2-337 | 333 | Ala-44 to Lys-51. | H0024: 3 | | |
| HLHAS94 | 509065 | 42 | 20-184 | 334 | Pro-2 to Ser-7. | H0208: 1 and H0024: | | |
| | | | | | | 1. | | |
| HLHAU38 | 927819 | 43 | 147-359 | 335 | Cys-21 to Glu-33, | H0024: 2 | | |
| | | | | | Pro-39 to Asp-46. | | | |
| HLHAV20 | 509053 | 44 | 28-135 | 336 | | H0024: 2 | | |
| HLHAX61 | 509047 | 45 | 7-174 | 337 | | H0024: 2, H0208: 1, | | |
| | | | | | | L0530: 1, L0747: 1 and | | |
| | | | | | | L0759: 1. | | |
| HLHAY72 | 509041 | 46 | 2-262 | 338 | Trp-1 to Pro-15, | H0208: 1 and H0024: | | |
| | | | | | Gly-29 to His-37, | 1. | | |
| | | | | | Met-77 to Arg-87. | | | |
| HLHAZ63 | 745615 | 47 | 72-326 | 339 | | H0024: 3 | | |
| HLHAZ94 | 523061 | 48 | 114-284 | 340 | Glu-7 to Leu-13. | H0024: 2 | | |
| HLHBA74 | 960487 | 49 | 51-161 | 341 | Ser-1 to Gln-22, | H0024: 2 | | |
| | | | | | Cys-26 to Gln-32. | | | |
| HLHBC30 | 910079 | 50 | 39-512 | 342 | Gln-7 to Glu-17. | AR061: 8, AR089: 5 | | |
| | | | | | | L0456: 3, H0024: 2 | | |
| | | | | | | and L0747: 1. | | |
| HLHBD62 | 948847 | 51 | 1-591 | 343 | Thr-1 to Leu-11, | AR061: 10, AR089: 8 | | |
| | | | | | Pro-44 to Gly-49. | H0024: 2 | | |
| HLHBW56 | 732581 | 52 | 1-129 | 344 | Lys-18 to Cys-24. | H0024: 2 | | |
| HLHBZ70 | 508939 | 53 | 116-205 | 345 | Arg-18 to Lys-24. | H0024: 2 | | |
| HLHCA32 | 564921 | 54 | 96-1 | 346 | Glu-1 to Asn-10. | H0024: 1 and H0375: | | |
| | | | | | | 1. | | |
| | 857033 | 300 | 221-421 | 592 | | | | |
| HLHCC16 | 825551 | 55 | 21-281 | 347 | Ile-1 to Asp-7, | H0024: 2 | | |
| | | | | | Lys-70 to Ser-84. | | | |
| HLHCC48 | 919282 | 56 | 3-278 | 348 | Ala-18 to Arg-25, | H0024: 2 | | |
| | | | | | Gly-31 to Cys-36. | | | |
| HLHCC94 | 974241 | 57 | 353-550 | 349 | Leu-36 to Ser-44. | H0024: 3 | | |
| HLHCD06 | 960648 | 58 | 44-283 | 350 | Asn-12 to Trp-18. | H0208: 2 and H0024: | | |
| | | | | | | 1. | | |
| HLHCD15 | 857037 | 59 | 2-127 | 351 | Ala-26 to Phe-32. | H0024: 2 | | |
| HLHCD46 | 719344 | 60 | 85-288 | 352 | Gly-1 to Pro-23, | H0024: 2 | | |
| | | | | | Ser-30 to Cys-35. | | | |
| HLHCD90 | 524079 | 61 | 265-426 | 353 | | H0024: 2 | | |
| HLHCE56 | 961054 | 62 | 3-191 | 354 | Pro-26 to Tyr-37. | H0024: 2 | | |
| HLHCE83 | 535294 | 63 | 232-414 | 355 | | H0024: 4 | | |
| HLHCF92 | 585495 | 64 | 93-401 | 356 | Tyr-1 to Tyr-6, | H0024: 2 | | |
| | | | | | Arg-30 to Phe-40, | | | |
| | | | | | Glu-48 to Arg-59. | | | |
| HLHCG45 | 508621 | 65 | 112-231 | 357 | | H0024: 2 | | |
| HLHCH02 | 921089 | 66 | 247-381 | 358 | | H0024: 2 | | |
| HLHCI90 | 530632 | 67 | 204-55 | 359 | Ser-9 to Ser-14, | H0024: 2 | | |
| | | | | | Ala-30 to His-38. | | | |
| HLHCK62 | 575320 | 68 | 78-236 | 360 | | H0024: 3 | | |
| HLHCK90 | 523986 | 69 | 139-276 | 361 | Arg-7 to Gly-16. | H0024: 3 | | |
| HLHCN92 | 558029 | 70 | 152-283 | 362 | | H0024: 2 | | |
| HLHCO33 | 723986 | 71 | 2-328 | 363 | Lys-3 to Pro-8, | H0024: 2 and L0769: | | |
| | | | | | Thr-50 to Ala-56. | 1. | | |
| HLHCP18 | 823470 | 72 | 145-285 | 364 | Pro-7 to Glu-15. | H0024: 2 | | |
| HLHCQ17 | 523063 | 73 | 51-197 | 365 | Pro-6 to Asn-11. | H0024: 2 | | |
| HLHCQ26 | 530637 | 74 | 1-210 | 366 | Arg-1 to Leu-10, | H0024: 2 | | |
| | | | | | Ala-37 to Ser-43, | | | |
| | | | | | Thr-53 to His-66. | | | |
| HLHCS34 | 974208 | 75 | 226-354 | 367 | | H0024: 4 and H0208: | | |
| | | | | | | 1. | | |
| HLHCT06 | 960650 | 76 | 150-323 | 368 | Asn-1 to Tyr-6. | H0024: 2 | | |
| HLHCT23 | 509044 | 77 | 101-361 | 369 | Gln-45 to Ser-53. | H0024: 3 | | |
| HLHCT27 | 960308 | 78 | 37-318 | 370 | Gly-25 to Ala-30, | H0024: 2 | | |
| | | | | | Gly-35 to Gly-40, | | | |
| | | | | | Ala-54 to Cys-59, | | | |
| | | | | | Glu-77 to Glu-82. | | | |
| HLHCU31 | 954273 | 79 | 51-191 | 371 | His-11 to Ile-19. | H0024: 3 | | |
| HLHCU38 | 968618 | 80 | 19-249 | 372 | Asn-1 to Glu-10, | H0208: 1 and H0024: | | |
| | | | | | Gly-34 to Trp-40. | 1. | | |
| HLHCX78 | 508786 | 81 | 2-130 | 373 | | H0024: 2 | | |
| HLHDC26 | 529735 | 82 | 21-125 | 374 | | H0024: 2 | | |
| HLHDD01 | 921640 | 83 | 3-140 | 375 | Pro-3 to Cys-10. | H0024: 2 | | |
| HLHDK22 | 529772 | 84 | 126-350 | 376 | | H0024: 2 | | |
| HLHDL63 | 506958 | 85 | 46-252 | 377 | Gln-17 to Cys-33, | H0024: 4 | | |
| | | | | | Leu-43 to Met-56. | | | |
| HLHDR39 | 523499 | 86 | 238-438 | 378 | | AR061: 7, AR089: 3 | | |
| | | | | | | H0024: 2 | | |
| HLHEE33 | 576260 | 87 | 1-126 | 379 | Gly-1 to Arg-11. | H0024: 2 | | |
| HLHEG01 | 857006 | 88 | 93-269 | 380 | | H0024: 2 | | |
| HLHEG38 | 578741 | 89 | 86-325 | 381 | | H0024: 2 | | |
| HLHEQ31 | 857009 | 90 | 176-310 | 382 | Ser-1 to Asp-11, | H0024: 2 | | |
| | | | | | Leu-13 to Glu-26. | | | |
| HLHER95 | 576495 | 91 | 3-167 | 383 | | H0024: 3 | | |
| HLHEV70 | 506397 | 92 | 342-527 | 384 | Pro-55 to Ser-60. | L0439: 4 and H0024: | | |
| | | | | | | 2. | | |
| HLHEY75 | 856987 | 93 | 3-107 | 385 | | H0024: 2 | | |
| HLHFG79 | 832594 | 94 | 83-346 | 386 | | H0024: 2 | | |
| HLHFJ55 | 576357 | 95 | 183-284 | 387 | | H0024: 2 | | |
| HLHFM14 | 576237 | 96 | 158-343 | 388 | Asn-16 to Lys-22, | H0024: 2 | | |
| | | | | | Glu-32 to Lys-37, | | | |
| | | | | | Ser-54 to Met-62. | | | |
| HLHFQ56 | 725328 | 97 | 3-338 | 389 | Ala-3 to Leu-9, | H0024: 1 and H0594: | | |
| | | | | | Pro-29 to Ser-43, | 1. | | |
| | | | | | Pro-45 to Cys-74. | | | |
| HLHFR56 | 840142 | 98 | 65-238 | 390 | | H0024: 2 | | |
| HLHFS84 | 576441 | 99 | 376-522 | 391 | Arg-2 to Gly-8. | H0024: 2 | | |
| HLHFT15 | 576451 | 100 | 1-171 | 392 | Asn-14 to Lys-20. | H0024: 2 | | |
| HLHFU09 | 964823 | 101 | 48-296 | 393 | | H0024: 3 and L0748: | | |
| | | | | | | 2. | | |
| HLHFU53 | 576228 | 102 | 82-426 | 394 | Thr-2 to Gly-9, | H0024: 2 | | |
| | | | | | Gln-19 to Gln-30. | | | |
| HLHGC43 | 714438 | 103 | 1-111 | 395 | Ser-21 to Glu-27. | H0024: 2 | | |
| HLHGH72 | 576242 | 104 | 3-176 | 396 | Arg-36 to Gly-50, | H0024: 2 | | |
| | | | | | Val-53 to Pro-58. | | | |
| HLHHQ95 | 502827 | 105 | 3-215 | 397 | Phe-1 to Ser-6. | H0024: 2 | | |
| HLHSA08 | 973520 | 106 | 170-343 | 398 | Asn-1 to Lys-12, | H0208: 2 and H0024: | | |
| | | | | | Thr-47 to Lys-52. | 1. | | |
| HLHSA46 | 857043 | 107 | 32-274 | 399 | Ser-23 to Ser-28. | H0024: 2 and H0208: | | |
| | | | | | | 1. | | |
| HLHSB08 | 960402 | 108 | 101-271 | 400 | Leu-14 to Arg-28. | H0208: 2 | | |
| HLHSB14 | 526213 | 109 | 2-304 | 401 | Lys-23 to His-31, | H0208: 1 and H0024: | | |
| | | | | | Thr-41 to Ser-54. | 1. | | |
| HLHSB25 | 526210 | 110 | 2-103 | 402 | Thr-28 to Arg-34. | H0208: 2 | | |
| HLHSE61 | 503281 | 111 | 1-201 | 403 | Leu-2 to Cys-27. | H0208: 1 and H0024: | | |
| | | | | | | 1. | | |
| HLHSG28 | 503381 | 112 | 218-313 | 404 | | H0024: 2 and H0208: | | |
| | | | | | | 1. | | |
| HLHSI02 | 856983 | 113 | 2-307 | 405 | Ile-1 to Thr-8, | H0208: 2 | | |
| | | | | | Glu-27 to Phe-32. | | | |
| HLHSI24 | 973701 | 114 | 466-633 | 406 | Leu-3 to Gln-16. | H0208: 2 and H0024: | | |
| | | | | | | 1. | | |
| HLHSI51 | 526201 | 115 | 89-205 | 407 | | H0208: 2 | | |
| HLHSJ39 | 508649 | 116 | 1-123 | 408 | | H0208: 1 and H0024: | | |
| | | | | | | 1. | | |
| HLHSK26 | 921007 | 117 | 1-276 | 409 | Glu-33 to Glu-43. | H0208: 1, H0024: 1 | | |
| | | | | | | and L0743: 1. | | |
| HLHSK41 | 522503 | 118 | 24-113 | 410 | Ser-2 to Lys-8. | H0208: 2 | | |
| HLHSK60 | 742366 | 119 | 207-335 | 411 | Cys-27 to Gln-33. | H0208: 2 | | |
| HLHSK84 | 526155 | 120 | 32-184 | 412 | | H0208: 2 | | |
| HLHSL08 | 960393 | 121 | 64-261 | 413 | Asn-5 to Cys-19. | H0208: 2 | | |
| HLHSL10 | 968628 | 122 | 61-216 | 414 | Asn-21 to Trp-36. | H0208: 1 and H0024: | | |
| | | | | | | 1. | | |
| HLHSL59 | 688076 | 123 | 1-225 | 415 | Asn-1 to Gly-11, | H0208: 1 and H0024: | | |
| | | | | | Arg-42 to Gly-47. | 1. | | |
| HLHSL78 | 526167 | 124 | 3-200 | 416 | | H0208: 2 | | |
| HLHSL95 | 887981 | 125 | 40-153 | 417 | Thr-6 to Arg-15. | H0024: 3 and H0208: | | |
| | | | | | | 1. | | |
| HLHSM15 | 519871 | 126 | 126-257 | 418 | Val-17 to Tyr-23, | H0208: 1 and H0024: | | |
| | | | | | Gln-27 to Cys-34. | 1. | | |
| HLHSM27 | 535340 | 127 | 28-300 | 419 | Arg-26 to Glu-33. | H0024: 3 and H0208: | | |
| | | | | | | 2. | | |
| HLHSM52 | 964827 | 128 | 1-672 | 420 | Glu-12 to Asp-17. | H0208: 1, H0024: 1, | | |
| | | | | | | L0776: 1, L0807: 1, | | |
| | | | | | | L0740: 1, L0747: 1 and | | |
| | | | | | | L0752: 1. | | |
| HLHSM65 | 753937 | 129 | 2-217 | 421 | | H0208: 2 | | |
| HLHSM92 | 856979 | 130 | 80-334 | 422 | | H0208: 2 | | |
| HLHSN05 | 932868 | 131 | 7-135 | 423 | | H0208: 4 | | |
| HLHSN51 | 503261 | 132 | 64-174 | 424 | | H0208: 1 and H0024: | | |
| | | | | | | 1. | | |
| HLHSN88 | 502830 | 133 | 23-151 | 425 | | H0208: 2 | | |
| HLHSP09 | 960889 | 134 | 215-352 | 426 | Ser-13 to Gly-22. | H0208: 2 | | |
| HLHSP67 | 526203 | 135 | 2-262 | 427 | Asp-6 to His-11, | H0208: 2 and L0439: | | |
| | | | | | Pro-50 to Ser-55. | 1. | | |
| HLHSP92 | 526097 | 136 | 148-285 | 428 | | H0208: 2 | | |
| HLHSQ52 | 526260 | 137 | 38-226 | 429 | Thr-35 to Pro-41, | H0208: 2 | | |
| | | | | | Arg-54 to Gly-62. | | | |
| HLHSQ71 | 509073 | 138 | 167-406 | 430 | Ser-18 to Leu-25, | H0208: 2 and H0024: | | |
| | | | | | Asp-31 to Thr-36. | 1. | | |
| HLHSQ84 | 678457 | 139 | 196-342 | 431 | | H0208: 3 | | |
| HLHSS07 | 954363 | 140 | 20-226 | 432 | Arg-18 to Tyr-27, | H0208: 2 | | |
| | | | | | His-42 to Phe-51, | | | |
| | | | | | Arg-61 to Asn-69. | | | |
| HLHSS53 | 519887 | 141 | 92-337 | 433 | Ala-5 to Gly-10. | H0208: 1 and H0024: | | |
| | | | | | | 1. | | |
| HLHST73 | 954914 | 142 | 1-168 | 434 | | H0208: 2 and H0024: | | |
| | | | | | | 2. | | |
| HLHSU30 | 933054 | 143 | 2-247 | 435 | Ile-1 to Glu-6, | H0208: 1 and H0024: | | |
| | | | | | Met-18 to Gly-30. | 1. | | |
| HLHSU75 | 961081 | 144 | 24-149 | 436 | Asp-1 to Gly-8. | H0208: 1 and H0024: | | |
| | | | | | | 1. | | |
| HLHSV08 | 973783 | 145 | 3-269 | 437 | Leu-30 to Trp-35, | H0208: 3 | | |
| | | | | | Arg-48 to Gly-67, | | | |
| | | | | | Ala-69 to Ala-80. | | | |
| HLHSV30 | 522505 | 146 | 1-207 | 438 | | H0208: 2 | | |
| HLHSV82 | 526110 | 147 | 54-164 | 439 | Arg-1 to His-14. | H0208: 1 and H0024: | | |
| | | | | | | 1. | | |
| HLHSW37 | 537265 | 148 | 138-320 | 440 | | H0208: 1 and H0024: | | |
| | | | | | | 1. | | |
| HLHSX01 | 973523 | 149 | 37-237 | 441 | Gln-37 to His-46. | H0208: 2 and H0024: | | |
| | | | | | | 1. | | |
| HLHSX48 | 973780 | 150 | 283-456 | 442 | Pro-22 to Ser-33. | H0208: 3 | | |
| HLHSZ60 | 522517 | 151 | 132-356 | 443 | Ser-12 to Gly-18, | H0208: 2 | | |
| | | | | | Thr-37 to Arg-46. | | | |
| HLHSZ69 | 526190 | 152 | 193-321 | 444 | His-1 to Cys-14. | H0208: 2 | | |
| HLHTA93 | 668792 | 153 | 136-321 | 445 | Arg-13 to Ser-18. | H0208: 2 | | |
| HLHTC07 | 933057 | 154 | 197-307 | 446 | Ser-17 to Lys-23. | H0208: 3 and H0024: | | |
| | | | | | | 1. | | |
| HLHTC21 | 856980 | 155 | 1-249 | 447 | | H0208: 2 | 17q23 | 106180, |
| | | | | | | | | 138700, |
| | | | | | | | | 139250, |
| | | | | | | | | 150200, |
| | | | | | | | | 154275, |
| | | | | | | | | 176960, |
| | | | | | | | | 249000, |
| | | | | | | | | 253250 |
| HLHTC52 | 728746 | 156 | 3-284 | 448 | Ser-8 to Arg-13, | H0208: 2 and H0024: | | |
| | | | | | Leu-17 to Asn-23. | 1. | | |
| HLHTC54 | 508050 | 157 | 128-232 | 449 | Arg-8 to Gln-18, | H0208: 1 and H0024: | | |
| | | | | | Gly-22 to Arg-28. | 1. | | |
| HLHTC65 | 522510 | 158 | 139-360 | 450 | | H0208: 1 and H0024: | | |
| | | | | | | 1. | | |
| HLHTC67 | 960701 | 159 | 3-194 | 451 | | H0208: 2 | | |
| HLHTC87 | 857038 | 160 | 1-228 | 452 | | H0208: 1 and H0024: | | |
| | | | | | | 1. | | |
| HLHTD08 | 925491 | 161 | 3-146 | 453 | Ser-1 to Gly-8. | H0208: 1 and L0547: | | |
| | | | | | | 1. | | |
| HLHTD61 | 856970 | 162 | 81-263 | 454 | Ala-23 to Gly-28, | H0208: 1 and H0024: | | |
| | | | | | Pro-36 to Ser-45. | 1. | | |
| HLHTK72 | 509040 | 163 | 3-170 | 455 | Pro-43 to Ser-49. | H0208: 1 and H0024: | | |
| | | | | | | 1. | | |
| HLHTL62 | 509078 | 164 | 113-202 | 456 | | H0208: 1, H0024: 1 | | |
| | | | | | | and L0369: 1. | | |
| HLHTM94 | 509048 | 165 | 76-180 | 457 | Pro-21 to Lys-31. | H0028: 2 and H0208: | | |
| | | | | | | 1. | | |
| HLHTN36 | 508937 | 166 | 1-270 | 458 | Ser-84 to Ser-89. | H0208: 1 and H0024: | | |
| | | | | | | 1. | | |
| HLHTO48 | 508959 | 167 | 3-128 | 459 | Gly-2 to Gln-9, | H0208: 2 and H0024: | | |
| | | | | | Asn-26 to Ile-32. | 1. | | |
| HLHTP70 | 525574 | 168 | 2-274 | 460 | Ser-8 to Thr-16. | H0208: 1 and H0024: | | |
| | | | | | | 1. | | |
| HLJBD62 | 558975 | 169 | 2-433 | 461 | Pro-15 to Pro-24. | H0375: 2 | | |
| HLJBE19 | 953727 | 170 | 70-234 | 462 | | H0375: 2 | | |
| HLJBH91 | 840250 | 171 | 626-414 | 463 | Ser-30 to Ser-41. | H0024: 1 and H0375: | | |
| | | | | | | 1. | | |
| HLJDL84 | 782823 | 172 | 188-397 | 464 | Thr-32 to Glu-45. | H0375: 2 | | |
| HLJDZ49 | 923476 | 173 | 11-196 | 465 | Lys-36 to Arg-43. | H0375: 2 | | |
| HTRAC19 | 509114 | 174 | 73-273 | 466 | Ser-17 to Asp-24, | H0164: 2 | | |
| | | | | | Arg-29 to Thr-37. | | | |
| HWKAB11 | 966529 | 175 | 137-331 | 467 | | L0766: 1 and S0296: 1. | | |
| HNLMB07 | 951944 | 176 | 1-204 | 468 | Ala-7 to Gly-12, | H0652: 1, L0523: 1 | | |
| | | | | | Gln-21 to Phe-26. | and L0756: 1. | | |
| HLJEB53 | 727924 | 177 | 220-474 | 469 | Asn-27 to Phe-37. | L0748: 9, H0375: 1 | | |
| | | | | | | and L0598: 1. | | |
| HLJDZ06 | 934837 | 178 | 274-441 | 470 | Trp-1 to Lys-7, | H0375: 1 and L0794: | | |
| | | | | | Pro-28 to Ser-33. | 1. | | |
| HLJDU56 | 853274 | 179 | 42-236 | 471 | Thr-34 to Thr-45, | L0754: 2, H0375: 1, | | |
| | | | | | Phe-59 to Tyr-65. | L0598: 1 and L0756: 1. | | |
| HLJDO65 | 747587 | 180 | 62-328 | 472 | Leu-1 to Ser-9, | L0747: 2, L0777: 2 and | | |
| | | | | | Cys-28 to Trp-35, | H0375: 1. | | |
| | | | | | Asn-38 to Val-44, | | | |
| | | | | | Thr-78 to Glu-84. | | | |
| HLJDO57 | 734445 | 181 | 53-217 | 473 | Ser-18 to Thr-30. | H0375: 1 and L0757: | | |
| | | | | | | 1. | | |
| HLJDO10 | 856927 | 182 | 95-259 | 474 | Pro-16 to His-21. | AR054: 24, AR051: | | |
| | | | | | | 24, AR050: 21 | | |
| | | | | | | H0375: 1 | | |
| | 963795 | 301 | 976-653 | 593 | | | | |
| HLJDN60 | 740061 | 183 | 162-272 | 475 | Gly-3 to Asn-13. | H0375: 1 and L0754: | | |
| | | | | | | 1. | | |
| HLJBR43 | 948850 | 184 | 1-672 | 476 | Val-7 to Gly-14, | L0439: 2, H0375: 1 | | |
| | | | | | Leu-78 to Asp-83. | and L0758: 1. | | |
| HLJBE22 | 674819 | 185 | 524-685 | 477 | Lys-1 to Ser-6, | L0777: 2, H0375: 1, | | |
| | | | | | Asn-43 to Asn-48. | L0439: 1 and L0749: 1. | | |
| HLHTN82 | 780223 | 186 | 201-323 | 478 | Lys-1 to Gly-6. | L0439: 2. and H0208: | | |
| | | | | | | 1. | | |
| HLHTJ69 | 753728 | 187 | 130-348 | 479 | Val-2 to Pro-8. | H0208: 1 and L0605: | | |
| | | | | | | 1. | | |
| HLHTG46 | 526232 | 188 | 106-258 | 480 | | H0208: 1 | | |
| HLHTF36 | 526250 | 189 | 86-298 | 481 | Ser-11 to Gly-19. | H0208: 1 | | |
| HLHTD25 | 526239 | 190 | 175-375 | 482 | Pro-20 to Gly-25 | L0748: 3, L0777: 2, | | |
| | | | | | His-32 to IIe-38. | H0208: 1 and L0769: 1. | | |
| HLHSW56 | 507494 | 191 | 149-322 | 483 | | L0748: 2, L0439: 2 and | | |
| | | | | | | H0208: 1. | | |
| HLHSI21 | 671463 | 192 | 94-219 | 484 | Lys-1 to Gly-7. | L0438: 2, H0208: 1 | | |
| | | | | | | and L0435: 1 | | |
| HLHQQ78 | 858508 | 193 | 342-569 | 485 | Ser-41 to Lys-46. | L0439: 2 and H0024: | | |
| | | | | | | 1. | | |
| HLHGH69 | 757636 | 194 | 6-365 | 486 | | H0024: 1 and L0750: | | |
| | | | | | | 1. | | |
| HLHGH68 | 753110 | 195 | 39-206 | 487 | Pro-22 to Trp-29. | H0024: 1 and L0777: | | |
| | | | | | | 1. | | |
| HLHGD64 | 746698 | 196 | 2-163 | 488 | | H0024: 1 and L0596: | | |
| | | | | | | 1. | | |
| HLHFZ58 | 735318 | 197 | 3-209 | 489 | Ser-18 to Gly-29, | L0777: 2 and H0024: | | |
| | | | | | Ile-31 to Leu-39. | 1. | | |
| HLHFU46 | 717922 | 198 | 3-179 | 490 | Leu-38 to Arg-44, | L0748: 6 and H0024: | | |
| | | | | | Ala-52 to Asp-58. | 1. | | |
| HLHFS01 | 916779 | 199 | 73-183 | 491 | Gln-30 to Ser-37. | H0024; 1 and L0598: | | |
| | | | | | | 1. | | |
| HLHFM25 | 840141 | 200 | 252-377 | 492 | Ser-22 to Tyr-29. | H0024: 1 and L0591: | | |
| | | | | | | 1. | | |
| HLHFF41 | 712427 | 201 | 176-442 | 493 | | L0749: 2 and H0024: | | |
| | | | | | | 1. | | |
| HLHFC11 | 967254 | 202 | 1-261 | 494 | Ser-2 to His-9. | H0024: 1 and L0777: | | |
| | | | | | | 1. | | |
| HLHEY63 | 668174 | 203 | 53-3 | 495 | Leu-2 to Lys-8. | H0024: 1 | | |
| HLHEY62 | 576148 | 204 | 130-2 | 496 | | H0024: 1 | | |
| HLHEX07 | 953548 | 205 | 3-143 | 497 | | H0024: 1 and L0794: | | |
| | | | | | | 1. | | |
| HLHET59 | 857001 | 206 | 255-413 | 498 | | L0527: 2 and H0024: | | |
| | | | | | | 1. | | |
| HLHEP07 | 953542 | 207 | 122-439 | 499 | His-2 to Thr-13. | L0803: 6, L0105: 2, | | |
| | | | | | | H0024: 1 and L0759: 1. | | |
| HLHEP02 | 920385 | 208 | 296-523 | 500 | Gln-1 to Ser-6, | L0747: 4, L0740: 2, | | |
| | | | | | Ser-35 to Leu-42. | H0024: 1 and L0763: 1. | | |
| HLHEO70 | 576526 | 209 | 2-181 | 501 | | H0024: 1 | | |
| HLHEN10 | 964868 | 210 | 429-566 | 502 | Lys-1 to Tyr-16, | H0024: 1 and L0803: | | |
| | | | | | Gly-26 to Gly-32. | 1. | | |
| HLHEG22 | 674764 | 211 | 245-499 | 503 | Asp-1 to Arg-8, | H0024: 1, L0748: 1 | | |
| | | | | | Trp-18 to Ser-23. | and L0745: 1. | | |
| HLHDS57 | 735102 | 212 | 566-772 | 504 | | H0024: 1 | | |
| HLHDP11 | 967751 | 213 | 2-364 | 505 | | L0756: 2 and H0024: | | |
| | | | | | | 1. | | |
| HLHDO38 | 709147 | 214 | 271-498 | 506 | Lys-61 to Cys-67. | H0024: 1 and L0589: | | |
| | | | | | | 1. | | |
| HLHDM69 | 529681 | 215 | 272-412 | 507 | | H0024: 1 | | |
| HLHDM43 | 529683 | 216 | 2-238 | 508 | Ala-1 to Gln-32. | H0024: 1 | | |
| HLHDM08 | 960214 | 217 | 2-139 | 509 | Cys-2 to Lys-12. | H0024: 1 | | |
| HLHDL25 | 857012 | 218 | 1-321 | 510 | Gln-21 to Phe-27, | H0024: 1 | | |
| | | | | | Ser-37 to His-43, | | | |
| | | | | | Pro-61 to Trp-66, | | | |
| | | | | | Asn-69 to Gly-75. | | | |
| HLHDL15 | 529685 | 219 | 133-324 | 511 | | H0024: 1 | | |
| HLHDD37 | 529187 | 220 | 3-299 | 512 | Gly-36 to Cys-54. | H0024: 1 and L0375: | | |
| | | | | | | 1. | | |
| HLHDD13 | 529190 | 221 | 36-302 | 513 | Glu-15 to Ser-20, | L0362: 2 and H0024: | | |
| | | | | | Lys-47 to Asn-58. | 1. | | |
| HLHCU54 | 731020 | 222 | 32-106 | 514 | Pro-18 to Lys-25. | H0024: 1 | | |
| HLHCT68 | 764745 | 223 | 44-217 | 515 | | AR061: 7, AR089: 6 | | |
| | | | | | | L0748: 2 and H0024: | | |
| | | | | | | 1. | | |
| HLHCN77 | 530617 | 224 | 37-252 | 516 | | H0024: 1 | | |
| HLHCN64 | 530621 | 225 | 173-271 | 517 | | H0024: 1 | | |
| HLHCN05 | 932023 | 226 | 3-281 | 518 | Pro-22 to Ser-30, | H0024: 1 and L0754: | | |
| | | | | | Arg-41 to Asp-51. | 1. | | |
| HLHCN02 | 921086 | 227 | 163-483 | 519 | Pro-39 to Glu-44, | H0024: 1 L0794: 1 | | |
| | | | | | Pro-81 to Pro-86, | and L0779: 1. | | |
| | | | | | His-101 to Cys-107. | | | |
| HLHCL93 | 530624 | 228 | 2-163 | 520 | | H0024: 1 | | |
| HLHCL89 | 530625 | 229 | 3-182 | 521 | | H0024: 1 | | |
| HLHCL83 | 530634 | 230 | 1-405 | 522 | Leu-17 to Gly-23, | H0024: 1 and L0605: | | |
| | | | | | Thr-88 to Asp-94, | 1. | | |
| | | | | | Thr-107 to Ser-116. | | | |
| HLHCL75 | 526573 | 231 | 3-197 | 523 | Pro-1 to Arg-7. | H0024: 1 | | |
| HLHCL50 | 857021 | 232 | 93-320 | 524 | | H0024: 1 | | |
| HLHCK32 | 530631 | 233 | 3-170 | 525 | Met-1 to Gln-9. | H0024: 1 and L0666: | | |
| | | | | | | 1. | | |
| HLHCD27 | 521947 | 234 | 169-23 | 526 | Gly-35 to Ala-47. | AR050: 8, AR051: 2, | | |
| | | | | | | AR054: 2 | | |
| | | | | | | H0024: 1 | | |
| HLHCC63 | 668121 | 235 | 553-53 | 527 | | H0024: 1 and L0592: | | |
| | | | | | | 1. | | |
| HLHCB07 | 954272 | 236 | 3-323 | 528 | Pro-90 to Tyr-96. | H0024: 1 and L0581: | | |
| | | | | | | 1. | | |
| HLHBF23 | 908589 | 237 | 161-490 | 529 | Lys-40 to Glu-51, | H0024: 1 and L0758: | | |
| | | | | | Arg-60 to Gly-65, | 1. | | |
| | | | | | Trp-85 to Gly-94, | | | |
| | | | | | Thr-104 to Gln-110. | | | |
| HLHBA66 | 909927 | 238 | 119-277 | 530 | Pro-16 to Tyr-24. | H0024: 1 and L0758: | | |
| | | | | | | 1. | | |
| HLHAR74 | 766008 | 239 | 336-548 | 531 | | H0024: 1 and L0758: | | |
| | | | | | | 1. | | |
| HLHAR03 | 960953 | 240 | 339-518 | 532 | | H0024: 1 and L0455: | | |
| | | | | | | 1. | | |
| HLHAM01 | 961084 | 241 | 70-231 | 533 | Thr-1 to Ser-12. | H0024: 1 and L0751: | | |
| | | | | | | 1. | | |
| HLHAD02 | 921354 | 242 | 480-827 | 534 | Ala-26 to Cys-33, | L0772: 2, L0754: 2, | | |
| | | | | | Val-82 to Gly-87, | L0759: 2, H0024: 1, | | |
| | | | | | Ser-94 to Asp-111. | L0773: 1, L0659: 1, | | |
| | | | | | | L0750: 1 and L0777: 1. | | |
| HLHAA95 | 575217 | 243 | 389-225 | 535 | Lys-1 to Gln-9. | H0024: 1 and L0748: | | |
| | | | | | | 1. | | |
| HLHAA14 | 660854 | 244 | 163-35 | 536 | | H0024: 1 | | |
| HLFBN59 | 503815 | 245 | 65-217 | 537 | Leu-9 to Ser-15. | T0003: 1 and L0599: 1. | | |
| HLFBM24 | 608745 | 246 | 261-67 | 538 | | T0003: 1 | | |
| HLFBM20 | 503816 | 247 | 89-274 | 539 | His-3 to Leu-13, | T0003: 1 | | |
| | | | | | Gly-16 to Ser-29. | | | |
| HLFBJ41 | 503818 | 248 | 367-161 | 540 | | T0003: 1 | | |
| HLFBI37 | 503820 | 249 | 60-185 | 541 | His-17 to Val-23. | T0003: 1 | | |
| HLFBH89 | 503823 | 250 | 195-79 | 542 | | T0003: 1 | | |
| HLFBH68 | 753855 | 251 | 217-372 | 543 | Glu-23 to Gln-33. | T0003: 1 | | |
| HLFBH56 | 522229 | 252 | 135-392 | 544 | | T0003: 1 | | |
| HLFBH31 | 693525 | 253 | 507-340 | 545 | Phe-10 to His- 16. | T0003: 1 and L0753: 1. | | |
| HLFBH20 | 504051 | 254 | 289-158 | 546 | Thr-29 to Ser-35. | T0003: 1 | | |
| HLFBG45 | 716946 | 255 | 1-168 | 547 | | AR089: 31, AR061: 24 | | |
| | | | | | | T0003: 1 and L0752: 1. | | |
| HLFBG21 | 504052 | 256 | 202-77 | 548 | Thr-1 to Val-8, | T0003: 1 | | |
| | | | | | Asp-32 to Gln-42. | | | |
| HLFBE01 | 961087 | 257 | 170-9 | 549 | Gln-1 to Ser-10. | T0003: 1 | | |
| HLFBD79 | 509799 | 258 | 337-221 | 550 | | T0003: 1 and L0754: 1. | | |
| HLFBD39 | 792908 | 259 | 2-184 | 551 | His-1 to Ser-11. | T0003: 1 | | |
| HLFBD23 | 509802 | 260 | 146-301 | 552 | | L0749: 2, T0003: 1, | | |
| | | | | | | L0639: 1 and L0803: 1. | | |
| HLFBD22 | 678664 | 261 | 120-302 | 553 | Lys-14 to Ser-19, | T0003: 1 | | |
| | | | | | Thr-31 to Lys-46, | | | |
| | | | | | Tyr-54 to Trp-59. | | | |
| HLFBC56 | 504068 | 262 | 205-71 | 554 | | T0003: 1 and L0749: 1. | | |
| HLFBC39 | 504073 | 263 | 154-56 | 555 | | T0003: 1 | | |
| HLFBC36 | 708000 | 264 | 490-792 | 556 | | L0748: 2, L0749: 2 and | | |
| | | | | | | T0003: 1. | | |
| HLFBC34 | 706197 | 265 | 113-223 | 557 | | T0003: 1 | | |
| HLFBC21 | 504070 | 266 | 45-260 | 558 | Lys-12 to Ser-27. | L0748: 2 and T0003: 1. | | |
| | 504071 | 302 | 232-62 | 594 | | | | |
| HLFBA62 | 504074 | 267 | 255-1 | 559 | Lys-16 to Asn-24, | T0003: 1 | | |
| | | | | | Thr-38 to Lys-46, | | | |
| | | | | | Asn-58 to Lys-64. | | | |
| HLFAA06 | 960815 | 268 | 545-375 | 560 | Pro-32 to Arg-40. | L0598: 3, T0003: 1 and | | |
| | | | | | | L0750: 1. | | |
| HIPAP03 | 922537 | 269 | 3-560 | 561 | Ser-36 to Gln-44, | L0777: 2 and H0647: | | |
| | | | | | Ala-48 to Leu-58, | 1. | | |
| | | | | | Asp-69 to Met-75, | | | |
| | | | | | Pro-79 to Gln-88, | | | |
| | | | | | Pro-98 to Gly-104, | | | |
| | | | | | Asp-130 to Ser-146, | | | |
| | | | | | Lys-175 to Leu-185. | | | |
| HIPAH86 | 886842 | 270 | 3-437 | 562 | | AR054: 11, AR051: 3, | | |
| | | | | | | AR050: 2 | | |
| | | | | | | H0647: 1 and L0769: | | |
| | | | | | | 1. | | |
| HIPAA05 | 930848 | 271 | 3-161 | 563 | | H0647: 1 L0749: 1 | | |
| | | | | | | and L0599: 1. | | |
| HIDAG10 | 970518 | 272 | 3-149 | 564 | Thr-9 to Thr-21. | H0649: 1 and L0754: | | |
| | | | | | | 1. | | |
| HIDAF76 | 857563 | 273 | 386-607 | 565 | | H0649: 1, L0593: 1 | | |
| | | | | | | and L0595: 1. | | |
| HIDAE12 | 968936 | 274 | 486-680 | 566 | Ile-50 to Gly-56. | H0649: 1 | | |
| HIDAA03 | 922105 | 275 | 285-449 | 567 | His-4 to Glu-9, | H0649: 1 and L0387: | | |
| | | | | | Lys-37 to Asp-42. | 1. | | |
| HCLSA61 | 742264 | 276 | 240-383 | 568 | | H0099: 1 and L0598: | | |
| | | | | | | 1. | | |
| HCLSA35 | 706334 | 277 | 3-320 | 569 | | H0099: 1, L0754: 1, | | |
| | | | | | | L0747: 1, L0749: 1 and | | |
| | | | | | | L0593: 1. | | |
| HCLCO10 | 963683 | 278 | 30-131 | 570 | Pro-20 to Gly-34. | L0163: 2 and H0594: | | |
| | | | | | | 1. | | |
| HCLCM46 | 718611 | 279 | 112-270 | 571 | Leu-11 to Lys-17, | H0594: 1 and L0748: | | |
| | | | | | His-26 to Tyr-34. | 1. | | |
| HCLCM45 | 717294 | 280 | 44-214 | 572 | Ser-9 to Gly-15. | L0777: 3 and H0594: | | |
| | | | | | | 1. | | |
| HCLBY11 | 966262 | 281 | 1-198 | 573 | | H0594: 1 and L0438: | | |
| | | | | | | 1. | | |
| HCLBW86 | 785116 | 282 | 167-355 | 574 | Asn-19 to Leu-30, | H0594: 1 and L0766: | | |
| | | | | | Asn-48 to Gly-54. | 1. | | |
| HCLBW52 | 747728 | 283 | 254-541 | 575 | | L0747: 3 and H0594: | | |
| | | | | | | 1. | | |
| HCLBQ23 | 675476 | 284 | 181-408 | 576 | | H0594: 1 and L0748: | | |
| | | | | | | 1. | | |
| HCLBH93 | 791947 | 285 | 290-475 | 577 | Ser-17 to Thr-24, | L0749: 3, L0748: 2 and | | |
| | | | | | Thr-42 to His-47, | H0594: 1. | | |
| | | | | | Pro-56 to Thr-62. | | | |
| HCLBE41 | 711947 | 286 | 96-203 | 578 | Lys-15 to Glu-20. | H0594: 1 and L0744: | | |
| | | | | | | 1. | | |
| HCLBE01 | 915533 | 287 | 50-226 | 579 | | H0594: 1 and L0744: | | |
| | | | | | | 1. | | |
| HCLBD23 | 675477 | 288 | 2-322 | 580 | Ser-4 to Cys-10. | H0594: 1 and L0753: | | |
| | | | | | | 1. | | |
| HCLBA05 | 931988 | 289 | 74-229 | 581 | Ser-5 to Pro-10. | L0748: 3 and H0594: | | |
| | | | | | | 1. | | |
| HBHMI94 | 794055 | 290 | 118-366 | 582 | Pro-29 to Gln-35. | S0310: 1 and L0745: 1. | | |
| HBHMH91 | 789520 | 291 | 67-237 | 583 | Gly-7 to Thr-14, | S0310: 1 and L0756: 1. | | |
| | | | | | Val-34 to Phe-39. | | | |
| HBHMB79 | 774694 | 292 | 328-456 | 584 | Ser-19 to Thr-25. | S0310: 1 and L0439: 1. | | |
| HAABL43 | 968966 | 293 | 225-734 | 585 | Ala-6 to Gln-11, | H0646: 1 and L0758: | | |
| | | | | | Glu-20 to Asp-30, | 1. | | |
| | | | | | Aia-92 to Lys-97, | | | |
| | | | | | Ser-165 to Ser-170. | | | |
| HAAAU10 | 961859 | 294 | 1-144 | 586 | | H0646: 1 and L0748: | | |
| | | | | | | 1. | | |
| HAAAN12 | 969399 | 295 | 511-774 | 587 | | H0646: 1, L0362: 1 | | |
| | | | | | | and L0601: 1. | | |
| HAAAM04 | 926254 | 296 | 211-396 | 588 | Tyr-1 to Gly-6. | L0741: 2 and H0362: 1 | | |
| | | | | | | 1. | | |
| HA5BM21 | 909795 | 297 | 3-467 | 589 | Gly-1 to Pro-13, | AR089: 9, AR061: 4 | | |
| | | | | | Ser-31 to Gly-44, | H0633: 1, L0769: 1, | | |
| | | | | | Ser-66 to Tyr-82, | L0764: 1 and L0757: 1. | | |
| | | | | | Arg-95 to Ser-102, | | | |
| | | | | | Glu-116 to Arg-125, | | | |
| | | | | | Lys-141 to Asn-146. | | | |
| HASAK05 | 930739 | 298 | 352-504 | 590 | | H0633: 1 and L0439: | | |
| | | | | | | 1. | | |
| HA5AG86 | 952440 | 299 | 70-345 | 591 | Ala-37 to Ser-42. | H0633: 1, L0540: 1 | | |
| | | | | | | and L0742: 1. | | |

[0059] The first column in Table 1A provides a unique “Clone ID NO:Z” for a cDNA clone related to each contig sequence disclosed in Table 1A. This clone ID references the cDNA clone which contains at least the 5′ most sequence of the assembled contig, and at least a portion of SEQ ID NO:X was determined by directly sequencing the referenced clone. The reference clone may have more sequence than described in the sequence listing or the clone may have less. In the vast majority of cases, however, the clone is believed to encode a full-length polypeptide. In the case where a clone is not full-length, a full-length cDNA can be obtained by methods known in the art and/or as described elsewhere herein.

[0060] The second column in Table 1A provides a unique “Contig ID” identification for each contig sequence. The third column provides the “SEQ ID NO:X” identifier for each of the respiratory system associated contig polynucleotide sequences disclosed in Table 1A. The fourth column, “ORF (From-To)”, provides the location (i.e., nucleotide position numbers) within the polynucleotide sequence “SEQ ID NO:X” that delineate the preferred open reading frame (ORF) shown in the sequence listing and referenced in Table 1A, column 5, as SEQ ID NO:Y. Where the nucleotide position number “To” is lower than the nucleotide position number “From”, the preferred ORF is the reverse complement of the referenced polynucleotide sequence.

[0061] The fifth column in Table 1A provides the corresponding SEQ ID NO:Y for the polypeptide sequence encoded by the preferred ORF delineated in column 4. In one embodiment, the invention provides an amino acid sequence comprising, or alternatively consisting of, a polypeptide encoded by the portion of SEQ ID NO:X delineated by “ORF (From-To)”. Also provided are polynucleotides encoding such amino acid sequences and the complementary strand thereto.

[0062] Column 6 in Table 1A lists residues comprising epitopes contained in the polypeptides encoded by the preferred ORF (SEQ ID NO:Y), as predicted using the algorithm of Jameson and Wolf, (1988) Comp. Appl. Biosci. 4:181-186. The Jameson-Wolf antigenic analysis was performed using the computer program PROTEAN (Version 3.11 for the Power MacIntosh, DNASTAR, Inc., 1228 South Park Street Madison, Wis.). In specific embodiments, polypeptides of the invention comprise, or alternatively consist of, at least one, two, three, four, five or more of the predicted epitopes as described in Table 1A. It will be appreciated that depending on the analytical criteria used to predict antigenic determinants, the exact address of the determinant may vary slightly.

[0063] Column 7 in Table 1A provides an expression profile and library code: count for each of the contig sequences (SEQ ID NO:X) disclosed in Table 1A, which can routinely be combined with the information provided in Table 4 and used to determine the normal or diseased tissues, cells, and/or cell line libraries which predominantly express the polynucleotides of the invention. The first number in column 7 (preceding the colon), represents the tissue/cell source identifier code corresponding to the code and description provided in Table 4. For those identifier codes in which the first two letters are not “AR”, the second number in column 7 (following the colon) represents the number of times a sequence corresponding to the reference polynucleotide sequence was identified in the tissue/cell source. Those tissue/cell source identifier codes in which the first two letters are “AR” designate information generated using DNA array technology. Utilizing this technology, cDNAs were amplified by PCR and then transferred, in duplicate, onto the array. Gene expression was assayed through hybridization of first strand cDNA probes to the DNA array. cDNA probes were generated from total RNA extracted from a variety of different tissues and cell lines. Probe synthesis was performed in the presence of ³³P dCTP, using oligo(dT) to prime reverse transcription. After hybridization, high stringency washing conditions were employed to remove non-specific hybrids from the array. The remaining signal, emanating from each gene target, was measured using a Phosphorimager. Gene expression was reported as Phosphor Stimulating Luminescence (PSL) which reflects the level of phosphor signal generated from the probe hybridized to each of the gene targets represented on the array. A local background signal subtraction was performed before the total signal generated from each array was used to normalize gene expression between the different hybridizations. The value presented after “[array code]:” represents the mean of the duplicate values, following background subtraction and probe normalization. One of skill in the art could routinely use this information to identify normal and/or diseased tissue(s) which show a predominant expression pattern of the corresponding polynucleotide of the invention or to identify polynucleotides which show predominant and/or specific tissue and/or cell expression. The sequences disclosed herein have been determined to be predominantly expressed in respiratory system tissues, including normal and diseased respiratory system tissues (See Table 1A, column 7 and Table 4).

[0064] Column 8 in Table 1A provides a chromosomal map location for certain polynucleotides of the invention. Chromosomal location was determined by finding exact matches to EST and cDNA sequences contained in the NCBI (National Center for Biotechnology Information) UniGene database. Each sequence in the UniGene database is assigned to a “cluster”; all of the ESTs, cDNAs, and STSs in a cluster are believed to be derived from a single gene. Chromosomal mapping data is often available for one or more sequence(s) in a UniGene cluster; this data (if consistent) is then applied to the cluster as a whole. Thus, it is possible to infer the chromosomal location of a new polynucleotide sequence by determining its identity with a mapped UniGene cluster.

[0065] A modified version of the computer program BLASTN (Altshul et al., J. Mol. Biol. 215:403-410 (1990), and Gish et al., Nat. Genet. 3:266-272 (1993)) was used to search the UniGene database for EST or cDNA sequences that contain exact or near-exact matches to a polynucleotide sequence of the invention (the ‘Query’). A sequence from the UniGene database (the ‘Subject’) was said to be an exact match if it contained a segment of 50 nucleotides in length such that 48 of those nucleotides were in the same order as found in the Query sequence. If all of the matches that met this criteria were in the same UniGene cluster, and mapping data was available for this cluster, it is indicated in Table 1A under the heading “Cytologic Band”. Where a cluster had been further localized to a distinct cytologic band, that band is disclosed; where no banding information was available, but the gene had been localized to a single chromosome, the chromosome is disclosed.

[0066] Once a presumptive chromosomal location was determined for a polynucleotide of the invention, an associated disease locus was identified by comparison with a database of diseases which have been experimentally associated with genetic loci. The database used was the Morbid Map, derived from OMIM™ (supra). If the putative chromosomal location of a polynucleotide of the invention (Query sequence) was associated with a disease in the Morbid Map database, an OMIM reference identification number was noted in column 9, Table 1A, labeled “OMIM Disease Reference(s)”. Table 5 is a key to the OMIM reference identification numbers (column 1), and provides a description of the associated disease in Column 2.

TABLE 1B

| Clone ID | SEQ ID | CONTIG | | SEQ ID | EXON |
|---|---|---|---|---|---|
| NO: Z | NO: X | ID: | BAC ID: A | NO:B | From-To |
| HBHMB50 | 13 | 724019 | AC020763 | 595 | 1-446 |
| HBHME61 | 14 | 741527 | AC023121 | 596 | 1-495 |
| HBHME61 | 14 | 741527 | AC023121 | 597 | 1-190 |
| HBHME61 | 14 | 741527 | AC023121 | 598 | 1-160 |
| HCLCR09 | 15 | 963688 | AF207550 | 599 | 1-564 |
| | | | | | 1690-1991 |
| | | | | | 3029-3488 |
| | | | | | 9926-10157 |
| | | | | | 12086-12367 |
| | | | | | 14333-15093 |
| | | | | | 16814-17630 |
| | | | | | 18459-18718 |
| | | | | | 18964-20109 |
| | | | | | 21283-21431 |
| | | | | | 21657-21788 |
| | | | | | 21963-22665 |
| | | | | | 22718-23286 |
| | | | | | 23356-24030 |
| | | | | | 24425-24812 |
| | | | | | 27475-27798 |
| | | | | | 28971-29861 |
| | | | | | 30495-30643 |
| | | | | | 31591-31770 |
| | | | | | 32256-32833 |
| | | | | | 33561-33767 |
| | | | | | 33857-33985 |
| | | | | | 34318-35592 |
| HCLCR09 | 15 | 963688 | AF207550 | 600 | 1-603 |
| HCLCW54 | 16 | 729100 | AC008869 | 601 | 1-396 |
| HCLCW54 | 16 | 729100 | AC008869 | 602 | 1-188 |
| HCLSB28 | 17 | 500815 | AC022080 | 603 | 1-292 |
| HCLSB28 | 17 | 500815 | AC068293 | 604 | 1-292 |
| HCLSB28 | 17 | 500815 | AC019255 | 605 | 1-292 |
| HCLSB28 | 17 | 500815 | AC068293 | 606 | 1-382 |
| HCLSB28 | 17 | 500815 | AC022080 | 607 | 1-90 |
| HCLSB28 | 17 | 500815 | AC068293 | 608 | 1-90 |
| HCLSB28 | 17 | 500815 | AC019255 | 609 | 1-90 |
| HCLSB28 | 17 | 500815 | AC019255 | 610 | 1-382 |
| HCLSB53 | 18 | 612042 | AC026117 | 611 | 1-310 |
| HCLSC85 | 19 | 973802 | AC069007 | 612 | 1-424 |
| HCLSC85 | 19 | 973802 | AC005670 | 613 | 1-406 |
| HCLSC85 | 19 | 973802 | AC069007 | 614 | 1-406 |
| HCLSC85 | 19 | 973802 | AC005670 | 615 | 1-404 |
| HCLSC85 | 19 | 973802 | AC005670 | 616 | 1-302 |
| HLAAA43 | 20 | 714473 | AC040914 | 617 | 1-168 |
| HLAAA43 | 20 | 714473 | AC019342 | 618 | 1-168 |
| HLAAA43 | 20 | 714473 | AC040914 | 619 | 1-566 |
| | | | | | 668-731 |
| | | | | | 1055-1394 |
| | | | | | 1403-1526 |
| HLAAA43 | 20 | 714473 | AC019342 | 620 | 1-566 |
| | | | | | 668-731 |
| | | | | | 1055-1394 |
| | | | | | 1403-1526 |
| HLFBE35 | 21 | 707221 | AP001769 | 621 | 1-356 |
| HLFBE35 | 21 | 707221 | AP000648 | 622 | 1-356 |
| HLFBE35 | 21 | 707221 | AP000827 | 623 | 1-356 |
| HLFBE35 | 21 | 707221 | AP001769 | 624 | 1-370 |
| HLFBE35 | 21 | 707221 | AP001769 | 625 | 1-301 |
| HLFBE35 | 21 | 707221 | AP000648 | 626 | 1-301 |
| HLFBE35 | 21 | 707221 | AP000827 | 627 | 1-297 |
| HLFBE35 | 21 | 707221 | AP000648 | 628 | 1-358 |
| HLFBE48 | 22 | 722012 | AC005884 | 629 | 1-447 |
| | | | | | 1340-1745 |
| | | | | | 2084-2389 |
| | | | | | 2582-2676 |
| | | | | | 4009-4239 |
| | | | | | 8614-8815 |
| | | | | | 9618-9906 |
| | | | | | 12128-12192 |
| HLFBE48 | 22 | 722012 | AC005884 | 630 | 1-440 |
| HLHAB50 | 25 | 932849 | AC006461 | 631 | 1-805 |
| HLHAB50 | 25 | 932849 | AC006461 | 632 | 1-371 |
| HLHAB50 | 25 | 932849 | AC006461 | 633 | 1-366 |
| HLHAD75 | 28 | 503274 | AL355503 | 634 | 1-365 |
| HLHAD75 | 28 | 503274 | AL157898 | 635 | 1-365 |
| HLHAD75 | 28 | 503274 | AL355503 | 636 | 1-287 |
| HLHAD75 | 28 | 503274 | AL355503 | 637 | 1-214 |
| HLHAD75 | 28 | 503274 | AL157898 | 638 | 1-287 |
| HLHAD75 | 28 | 503274 | AL157898 | 639 | 1-204 |
| HLHAD82 | 29 | 503280 | AL162408 | 640 | 1-655 |
| HLHAD82 | 29 | 503280 | AL136369 | 641 | 1-655 |
| HLHAD82 | 29 | 503280 | AL162408 | 642 | 1-86 |
| HLHAD82 | 29 | 503280 | AL136369 | 643 | 1-86 |
| HLHAE04 | 30 | 933056 | AC021220 | 644 | 1-407 |
| HLHAE29 | 31 | 503186 | AL136964 | 645 | 1-218 |
| HLHAE29 | 31 | 503186 | AC034296 | 646 | 1-218 |
| HLHAE29 | 31 | 503186 | AL136964 | 647 | 1-710 |
| HLHAE29 | 31 | 503186 | AC034296 | 648 | 1-710 |
| HLHAE29 | 31 | 503186 | AL136964 | 649 | 1-405 |
| | | | | | 936-1285 |
| HLHAE29 | 31 | 503186 | AC034296 | 650 | 1-405 |
| | | | | | 936-1285 |
| HLHAE30 | 32 | 857041 | AC007878 | 651 | 1-579 |
| HLHAE30 | 32 | 857041 | AC007878 | 652 | 1-251 |
| HLHAE30 | 32 | 857041 | AC007878 | 653 | 1-405 |
| HLHAE54 | 34 | 503264 | AC073992 | 654 | 1-320 |
| HLHAL02 | 36 | 921350 | AC063953 | 655 | 1-224 |
| HLHAL02 | 36 | 921350 | AC016936 | 656 | 1-224 |
| HLHAL02 | 36 | 921350 | AC069427 | 657 | 1-224 |
| HLHAM69 | 37 | 509151 | AC022281 | 658 | 1-445 |
| HLHAM69 | 37 | 509151 | AC022281 | 659 | 1-120 |
| HLHAM69 | 37 | 509151 | AC022281 | 660 | 1-171 |
| HLHAN75 | 38 | 925451 | AC009404 | 661 | 1-1704 |
| | | | | | 1993-5553 |
| | | | | | 8090-8223 |
| | | | | | 8485-8677 |
| | | | | | 8899-9733 |
| | | | | | 10035-13802 |
| | | | | | 16575-19182 |
| | | | | | 19291-19673 |
| | | | | | 21279-21782 |
| | | | | | 21792-22635 |
| | | | | | 22784-22888 |
| | | | | | 22972-24132 |
| HLHAN75 | 38 | 925451 | AC009404 | 662 | 1-368 |
| HLHAO42 | 39 | 509082 | AC034147 | 663 | 1-280 |
| HLHAO42 | 39 | 509082 | AC004695 | 664 | 1-280 |
| HLHAS70 | 41 | 727840 | AC023648 | 665 | 1-677 |
| | | | | | 702-1145 |
| | | | | | 2242-2473 |
| | | | | | 2508-3325 |
| | | | | | 3516-3697 |
| | | | | | 3760-3877 |
| | | | | | 4396-5312 |
| | | | | | 5448-6191 |
| | | | | | 6506-6618 |
| | | | | | 6695-8173 |
| HLHAS70 | 41 | 727840 | AC023648 | 666 | 1-274 |
| HLHAS94 | 42 | 509065 | AC021424 | 667 | 1-321 |
| HLHAS94 | 42 | 509065 | AC002403 | 668 | 1-321 |
| HLHAS94 | 42 | 509065 | U90095 | 669 | 1-321 |
| HLHAS94 | 42 | 509065 | AC021424 | 670 | 1-250 |
| HLHAS94 | 42 | 509065 | AC002403 | 671 | 1-250 |
| HLHAS94 | 42 | 509065 | U90095 | 672 | 1-250 |
| HLHAU38 | 43 | 927819 | AC024062 | 673 | 1-764 |
| HLHAU38 | 43 | 927819 | AC019130 | 674 | 1-763 |
| HLHAU38 | 43 | 927819 | AC019130 | 675 | 1-358 |
| HLHAU38 | 43 | 927819 | AC024062 | 676 | 1-215 |
| HLHAU38 | 43 | 927819 | AC019130 | 677 | 1-215 |
| HLHAV20 | 44 | 509053 | AC073877 | 678 | 1-273 |
| HLHAV20 | 44 | 509053 | AC024732 | 679 | 1-273 |
| HLHAY72 | 46 | 509041 | AC011236 | 680 | 1-712 |
| HLHAY72 | 46 | 509041 | AC011236 | 681 | 1-1187 |
| HLHAY72 | 46 | 509041 | AC011236 | 682 | 1-96 |
| HLHAZ63 | 47 | 745615 | AL022069 | 683 | 1-319 |
| HLHAZ63 | 47 | 745615 | AL022069 | 684 | 1-106 |
| HLHAZ63 | 47 | 745615 | AL022069 | 685 | 1-269 |
| HLHAZ94 | 48 | 523061 | AC018603 | 686 | 1-305 |
| HLHAZ94 | 48 | 523061 | AC018603 | 687 | 1-652 |
| HLHAZ94 | 48 | 523061 | AC018603 | 688 | 1-326 |
| HLHBA74 | 49 | 960487 | AC012040 | 689 | 1-433 |
| HLHBA74 | 49 | 960487 | AC026474 | 690 | 1-433 |
| HLHBA74 | 49 | 960487 | AC026464 | 691 | 1-433 |
| HLHBA74 | 49 | 960487 | AC012040 | 692 | 1-293 |
| HLHBA74 | 49 | 960487 | AC026474 | 693 | 1-289 |
| HLHBC30 | 50 | 910079 | AC012510 | 694 | 1-85 |
| | | | | | 1031-2857 |
| | | | | | 2988-3247 |
| | | | | | 3529-3707 |
| | | | | | 4019-4963 |
| HLHBC30 | 50 | 910079 | AC012510 | 695 | 1-1542 |
| | | | | | 1719-1816 |
| | | | | | 2516-2723 |
| | | | | | 3394-4742 |
| | | | | | 4760-5216 |
| HLHBC30 | 50 | 910079 | AC012510 | 696 | 1-105 |
| HLHBD62 | 51 | 948847 | AL356796 | 697 | 1-324 |
| HLHBZ70 | 53 | 508939 | AC002519 | 698 | 1-1570 |
| HLHBZ70 | 53 | 508939 | AC002519 | 699 | 1-77 |
| | | | | | 1106-2134 |
| | | | | | 2298-2635 |
| | | | | | 2641-3321 |
| | | | | | 4046-4668 |
| | | | | | 5189-6072 |
| HLHCC48 | 56 | 919282 | AC022930 | 700 | 1-286 |
| | | | | | 338-420 |
| | | | | | 861-1139 |
| | | | | | 1256-1372 |
| | | | | | 1458-1658 |
| | | | | | 1792-4476 |
| | | | | | 4677-5112 |
| | | | | | 6561-6694 |
| HLHCC48 | 56 | 919282 | AC022930 | 701 | 1-976 |
| HLHCC94 | 57 | 974241 | AC069040 | 702 | 1-693 |
| HLHCC94 | 57 | 974241 | AC013244 | 703 | 1-693 |
| HLHCC94 | 57 | 974241 | AC013244 | 704 | 1-293 |
| HLHCC94 | 57 | 974241 | AC069040 | 705 | 1-293 |
| HLHCC94 | 57 | 974241 | AC013244 | 706 | 1-372 |
| HLHCD06 | 58 | 960648 | AL358233 | 707 | 1-428 |
| HLHCD06 | 58 | 960648 | AC022728 | 708 | 1-428 |
| HLHCD06 | 58 | 960648 | AL358233 | 709 | 1-616 |
| HLHCD06 | 58 | 960648 | AC022728 | 710 | 1-616 |
| HLHCD46 | 60 | 719344 | AC011372 | 711 | 1-287 |
| HLHCD46 | 60 | 719344 | AC011372 | 712 | 1-292 |
| HLHCD46 | 60 | 719344 | AC011372 | 713 | 1-145 |
| HLHCE56 | 62 | 961054 | AC011037 | 714 | 1-336 |
| HLHCE56 | 62 | 961054 | AC027006 | 715 | 1-336 |
| HLHCE56 | 62 | 961054 | AC013416 | 716 | 1-334 |
| HLHCE56 | 62 | 961054 | AC011037 | 717 | 1-147 |
| HLHCE56 | 62 | 961054 | AC027006 | 718 | 1-147 |
| HLHCE56 | 62 | 961054 | AC013416 | 719 | 1-921 |
| HLHCE56 | 62 | 961054 | AC013416 | 720 | 1-100 |
| HLHCH02 | 66 | 921089 | AC010316 | 721 | 1-367 |
| | | | | | 1159-1242 |
| | | | | | 1291-1676 |
| | | | | | 2017-2507 |
| | | | | | 3069-3470 |
| | | | | | 3643-3822 |
| | | | | | 4412-4972 |
| | | | | | 5010-5181 |
| | | | | | 5322-5787 |
| | | | | | 6070-6243 |
| | | | | | 8026-8202 |
| | | | | | 13089-13608 |
| | | | | | 13925-17687 |
| HLHCH02 | 66 | 921089 | AC010316 | 722 | 1-444 |
| HLHCH02 | 66 | 921089 | AC010316 | 723 | 1-132 |
| HLHCI90 | 67 | 530632 | AC073869 | 724 | 1-454 |
| HLHCI90 | 67 | 530632 | AC073869 | 725 | 1-454 |
| HLHCI90 | 67 | 530632 | AC073869 | 726 | 1-107 |
| HLHCQ17 | 73 | 523063 | AP001972 | 727 | 1-199 |
| HLHCQ17 | 73 | 523063 | AP000744 | 728 | 1-625 |
| HLHCQ17 | 73 | 523063 | AP001882 | 729 | 1-199 |
| HLHCQ17 | 73 | 523063 | AP000482 | 730 | 1-625 |
| HLHCQ17 | 73 | 523063 | AC022045 | 731 | 1-625 |
| HLHCQ17 | 73 | 523063 | AP000744 | 732 | 1-412 |
| HLHCQ17 | 73 | 523063 | AP000482 | 733 | 1-412 |
| HLHCQ17 | 73 | 523063 | AP000482 | 734 | 1-180 |
| HLHCQ17 | 73 | 523063 | AC022045 | 735 | 1-412 |
| HLHCQ17 | 73 | 523063 | AC022045 | 736 | 1-180 |
| HLHCQ26 | 74 | 530637 | AL138925 | 737 | 1-214 |
| HLHCQ26 | 74 | 530637 | AC068894 | 738 | 1-214 |
| HLHCS34 | 75 | 974208 | AC021875 | 739 | 1-652 |
| HLHCS34 | 75 | 974208 | AC006417 | 740 | 1-652 |
| HLHCT23 | 77 | 509044 | AC000052 | 741 | 1-551 |
| HLHCT23 | 77 | 509044 | AC004019 | 742 | 1-551 |
| HLHCT23 | 77 | 509044 | AC000052 | 743 | 1-229 |
| HLHCT23 | 77 | 509044 | AC000052 | 744 | 1-484 |
| HLHCT23 | 77 | 509044 | AC004019 | 745 | 1-229 |
| HLHCT23 | 77 | 509044 | AC004019 | 746 | 1-485 |
| HLHCT27 | 78 | 960308 | AL158847 | 747 | 1-137 |
| HLHCU31 | 79 | 954273 | AL359883 | 748 | 1-262 |
| HLHCU31 | 79 | 954273 | AL359875 | 749 | 1-262 |
| HLHCU31 | 79 | 954273 | AC026050 | 750 | 1-262 |
| HLHCU31 | 79 | 954273 | AL359883 | 751 | 1-330 |
| | | | | | 674-1135 |
| HLHCU31 | 79 | 954273 | AC026050 | 752 | 1-330 |
| | | | | | 674-1135 |
| | | | | | 2231-2283 |
| | | | | | 2722-3027 |
| | | | | | 3251-3375 |
| | | | | | 4651-5097 |
| | | | | | 5224-5409 |
| HLHCU31 | 79 | 954273 | AC026050 | 753 | 1-104 |
| HLHCU38 | 80 | 968618 | AC025438 | 754 | 1-313 |
| HLHCU38 | 80 | 968618 | AC002299 | 755 | 1-313 |
| HLHCU38 | 80 | 968618 | AC025438 | 756 | 1-567 |
| HLHCU38 | 80 | 968618 | AC025438 | 757 | 1-357 |
| HLHCU38 | 80 | 968618 | AC002299 | 758 | 1-567 |
| HLHCU38 | 80 | 968618 | AC002299 | 759 | 1-358 |
| HLHCX78 | 81 | 508786 | AC016125 | 760 | 1-348 |
| HLHCX78 | 81 | 508786 | AP000680 | 761 | 1-597 |
| HLHDC26 | 82 | 529735 | AC010614 | 762 | 1-671 |
| HLHDC26 | 82 | 529735 | AL354656 | 763 | 1-843 |
| HLHDC26 | 82 | 529735 | AL354656 | 764 | 1-439 |
| HLHDC26 | 82 | 529735 | AC010614 | 765 | 1-157 |
| HLHDC26 | 82 | 529735 | AL354656 | 766 | 1-87 |
| HLHDK22 | 84 | 529772 | AC008762 | 767 | 1-356 |
| HLHDK22 | 84 | 529772 | AC008762 | 768 | 1-399 |
| | | | | | 652-751 |
| | | | | | 2360-2412 |
| | | | | | 2553-3579 |
| | | | | | 3686-6000 |
| HLHDK22 | 84 | 529772 | AC008762 | 769 | 1-378 |
| HLHDR39 | 86 | 523499 | AL354760 | 770 | 1-504 |
| HLHDR39 | 86 | 523499 | AL354760 | 771 | 1-528 |
| HLHDR39 | 86 | 523499 | AL354760 | 772 | 1-1210 |
| HLHEG01 | 88 | 857006 | AC007643 | 773 | 1-585 |
| | | | | | 685-1152 |
| | | | | | 1235-1780 |
| HLHEG01 | 88 | 857006 | AL353719 | 774 | 1-584 |
| | | | | | 684-1151 |
| | | | | | 1234-1779 |
| HLHEG01 | 88 | 857006 | AL133353 | 775 | 1-464 |
| | | | | | 2377-2562 |
| | | | | | 4118-4377 |
| | | | | | 4552-4672 |
| | | | | | 4959-5146 |
| | | | | | 5203-5489 |
| | | | | | 6227-6451 |
| | | | | | 7991-8157 |
| | | | | | 8705-9114 |
| | | | | | 9279-9406 |
| | | | | | 11045-11127 |
| | | | | | 11660-11741 |
| | | | | | 11975-12445 |
| | | | | | 12544-12875 |
| | | | | | 13035-13355 |
| | | | | | 13610-13771 |
| | | | | | 13798-13979 |
| | | | | | 14538-14596 |
| | | | | | 14640-15110 |
| | | | | | 15419-16057 |
| | | | | | 17391-20269 |
| | | | | | 20461-23356 |
| | | | | | 23416-23893 |
| | | | | | 23938-24466 |
| | | | | | 24956-26285 |
| | | | | | 26417-27663 |
| | | | | | 28956-29359 |
| | | | | | 29439-29598 |
| | | | | | 30051-30139 |
| | | | | | 31052-31250 |
| | | | | | 33254-33582 |
| | | | | | 35994-36625 |
| | | | | | 36725-37192 |
| | | | | | 37275-37820 |
| | | | | | 40594-40729 |
| | | | | | 43221-43695 |
| | | | | | 44122-44421 |
| | | | | | 46217-46320 |
| | | | | | 46848-46986 |
| | | | | | 52237-52390 |
| | | | | | 52646-52845 |
| HLHEG01 | 88 | 857006 | AL133353 | 776 | 1-303 |
| HLHEG01 | 88 | 857006 | AL133353 | 777 | 1-1415 |
| | | | | | 1501-2436 |
| | | | | | 2646-3116 |
| | | | | | 3755-4341 |
| | | | | | 5742-5765 |
| | | | | | 6438-6778 |
| | | | | | 8744-8880 |
| | | | | | 12065-12095 |
| | | | | | 12770-12983 |
| | | | | | 16364-16423 |
| | | | | | 17973-18216 |
| | | | | | 19816-19891 |
| | | | | | 21007-21139 |
| | | | | | 23574-23710 |
| | | | | | 23713-23934 |
| HLHEG38 | 89 | 578741 | AL391058 | 778 | 1-35 |
| | | | | | 101-478 |
| | | | | | 631-1112 |
| HLHEG38 | 89 | 578741 | AL391058 | 779 | 1-284 |
| HLHEQ31 | 90 | 857009 | AC007619 | 780 | 1-1482 |
| HLHEQ31 | 90 | 857009 | AC007619 | 781 | 1-452 |
| HLHER95 | 91 | 576495 | AL359927 | 782 | 1-411 |
| HLHER95 | 91 | 576495 | AC018373 | 783 | 1-411 |
| HLHER95 | 91 | 576495 | AC018373 | 784 | 1-41 |
| | | | | | 1399-1622 |
| | | | | | 3630-3926 |
| | | | | | 5500-6061 |
| | | | | | 7022-7144 |
| | | | | | 7888-8091 |
| | | | | | 8237-8640 |
| HLHEV70 | 92 | 506397 | AC078859 | 785 | 1-1780 |
| HLHEV70 | 92 | 506397 | AC018776 | 786 | 1-1780 |
| HLHEV70 | 92 | 506397 | AC073030 | 787 | 1-1780 |
| HLHEV70 | 92 | 506397 | AC073030 | 788 | 1-1359 |
| HLHEY75 | 93 | 856987 | AC074086 | 789 | 1-451 |
| HLHEY75 | 93 | 856987 | AC074086 | 790 | 1-483 |
| HLHFJ55 | 95 | 576357 | AC022721 | 791 | 1-357 |
| HLHFJ55 | 95 | 576357 | AC022721 | 792 | 1-114 |
| HLHFM14 | 96 | 576237 | AL158840 | 793 | 1-912 |
| HLHFM14 | 96 | 576237 | AC025738 | 794 | 1-912 |
| HLHFR56 | 98 | 840142 | AC044830 | 795 | 1-267 |
| HLHFS84 | 99 | 576441 | AC012435 | 796 | 1-548 |
| HLHFU09 | 101 | 964823 | AC005098 | 797 | 1-652 |
| | | | | | 1677-1742 |
| | | | | | 3926-4110 |
| | | | | | 4441-4790 |
| | | | | | 5371-5427 |
| | | | | | 6499-6980 |
| | | | | | 7265-7541 |
| | | | | | 7947-8131 |
| | | | | | 8632-9358 |
| | | | | | 9405-9873 |
| | | | | | 10879-11339 |
| | | | | | 11501-11815 |
| | | | | | 12951-13537 |
| | | | | | 14055-14324 |
| | | | | | 14642-14973 |
| | | | | | 15034-15360 |
| | | | | | 15439-16460 |
| | | | | | 17118-17548 |
| | | | | | 17785-18391 |
| | | | | | 19228-19569 |
| | | | | | 19602-20420 |
| | | | | | 20477-20603 |
| | | | | | 20614-21110 |
| | | | | | 22814-22870 |
| | | | | | 23485-24018 |
| | | | | | 24541-24635 |
| | | | | | 24822-25139 |
| | | | | | 25298-25482 |
| | | | | | 25508-26999 |
| | | | | | 27280-27657 |
| | | | | | 27945-28318 |
| | | | | | 29346-29453 |
| | | | | | 29776-32146 |
| HLHFU09 | 101 | 964823 | AC004166 | 798 | 1-332 |
| | | | | | 393-715 |
| | | | | | 799-1820 |
| | | | | | 2478-2908 |
| | | | | | 3145-3751 |
| | | | | | 4588-4928 |
| | | | | | 4961-5779 |
| | | | | | 5836-5962 |
| | | | | | 5973-6469 |
| | | | | | 8168-8224 |
| | | | | | 8839-9372 |
| | | | | | 9895-9989 |
| | | | | | 10176-10493 |
| | | | | | 10652-10836 |
| | | | | | 10862-12353 |
| | | | | | 12634-13011 |
| | | | | | 13299-13672 |
| | | | | | 14701-14808 |
| | | | | | 15128-17498 |
| HLHFU09 | 101 | 964823 | AC004883 | 799 | 1-327 |
| | | | | | 2070-2198 |
| | | | | | 3874-3962 |
| | | | | | 7592-7766 |
| | | | | | 8910-9011 |
| | | | | | 9221-9349 |
| | | | | | 9500-9849 |
| | | | | | 10018-10405 |
| | | | | | 10570-10731 |
| | | | | | 10849-11182 |
| | | | | | 11341-11783 |
| | | | | | 13794-14228 |
| | | | | | 14488-14637 |
| | | | | | 14811-15222 |
| | | | | | 15493-15972 |
| | | | | | 16882-17000 |
| | | | | | 17070-17314 |
| | | | | | 20625-20750 |
| | | | | | 22630-23012 |
| | | | | | 26124-26586 |
| | | | | | 26913-27107 |
| | | | | | 28249-29057 |
| | | | | | 32026-32432 |
| | | | | | 35804-35950 |
| | | | | | 36857-37218 |
| | | | | | 37705-38055 |
| | | | | | 39063-39252 |
| | | | | | 39662-40313 |
| | | | | | 41338-41403 |
| | | | | | 43297-43405 |
| | | | | | 43589-43773 |
| | | | | | 44104-44453 |
| | | | | | 45035-45091 |
| | | | | | 46163-46644 |
| | | | | | 46814-47205 |
| | | | | | 47611-47795 |
| | | | | | 48296-49022 |
| | | | | | 49069-49537 |
| | | | | | 49941-50182 |
| | | | | | 50534-50994 |
| | | | | | 51156-51470 |
| | | | | | 52607-53193 |
| | | | | | 53711-53980 |
| | | | | | 54165-55015 |
| | | | | | 55097-56118 |
| | | | | | 56776-57206 |
| | | | | | 57443-58049 |
| | | | | | 58886-59226 |
| | | | | | 59259-60077 |
| | | | | | 60134-60260 |
| | | | | | 60271-61009 |
| | | | | | 62465-62521 |
| | | | | | 63136-63669 |
| | | | | | 64192-64286 |
| | | | | | 64473-64790 |
| | | | | | 64949-65133 |
| | | | | | 65159-66650 |
| | | | | | 66931-67308 |
| | | | | | 67596-67969 |
| | | | | | 68998-69105 |
| | | | | | 69425-71795 |
| HLHFU09 | 101 | 964823 | AC006995 | 800 | 1-85 |
| | | | | | 278-595 |
| | | | | | 755-939 |
| | | | | | 965-2458 |
| | | | | | 2739-3116 |
| | | | | | 3656-3773 |
| | | | | | 4806-4913 |
| | | | | | 5236-7606 |
| HLHFU09 | 101 | 964823 | AC061712 | 801 | 1-85 |
| | | | | | 278-595 |
| | | | | | 755-939 |
| | | | | | 965-2455 |
| | | | | | 2736-3113 |
| | | | | | 3401-3774 |
| | | | | | 4803-4908 |
| | | | | | 5233-7608 |
| HLHFU09 | 101 | 964823 | AC00580 | 802 | 1-1289 |
| | | | | | 1442-1969 |
| | | | | | 2319-2970 |
| | | | | | 3994-4059 |
| | | | | | 5977-6094 |
| | | | | | 6224-6408 |
| | | | | | 6740-7089 |
| | | | | | 7386-7533 |
| | | | | | 7677-7733 |
| | | | | | 8805-9286 |
| | | | | | 9570-9846 |
| | | | | | 10252-10436 |
| | | | | | 10937-11665 |
| | | | | | 11712-12179 |
| | | | | | 13181-13641 |
| | | | | | 13803-14117 |
| | | | | | 15253-15839 |
| | | | | | 16357-16626 |
| | | | | | 16809-17275 |
| | | | | | 17336-17662 |
| | | | | | 17740-18758 |
| | | | | | 19416-19847 |
| | | | | | 20084-20690 |
| | | | | | 21527-21865 |
| | | | | | 21898-22716 |
| | | | | | 22773-22899 |
| | | | | | 22910-23648 |
| | | | | | 25102-25158 |
| | | | | | 25773-26306 |
| | | | | | 26828-26922 |
| | | | | | 27109-27426 |
| | | | | | 27586-27770 |
| | | | | | 27796-29287 |
| | | | | | 29568-29945 |
| | | | | | 30233-30606 |
| | | | | | 31635-31742 |
| | | | | | 32065-34435 |
| HLHFU09 | 101 | 964823 | AC005098 | 803 | 1-190 |
| HLHFU09 | 101 | 964823 | AC004166 | 804 | 1-270 |
| HLHFU09 | 101 | 964823 | AC004883 | 805 | 1-244 |
| HLHFU09 | 101 | 964823 | AC006995 | 806 | 1-91 |
| HLHFU09 | 101 | 964823 | AC061712 | 807 | 1-288 |
| HLHFU09 | 101 | 964823 | AC061712 | 808 | 1-91 |
| HLHFU09 | 101 | 964823 | AC005080 | 809 | 1-1180 |
| HLHGH72 | 104 | 576242 | AL117258 | 810 | 1-440 |
| HLHGH72 | 104 | 576242 | AL117258 | 811 | 1-186 |
| HLHSA08 | 106 | 973520 | AC021166 | 812 | 1-621 |
| HLHSA46 | 107 | 857043 | AC008395 | 813 | 1-337 |
| HLHSA46 | 107 | 857043 | AC008395 | 814 | 1-505 |
| HLHSA46 | 107 | 857043 | AC008395 | 815 | 1-269 |
| HLHSB08 | 108 | 960402 | AL021978 | 816 | 1-366 |
| HLHSB08 | 108 | 960402 | AC022385 | 817 | 1-366 |
| HLHSB08 | 108 | 960402 | AL021978 | 818 | 1-98 |
| NLHSB08 | 108 | 960402 | AC022385 | 819 | 1-98 |
| HLHSE61 | 111 | 503281 | AL356453 | 820 | 1-338 |
| HLHSE61 | 111 | 503281 | AC006384 | 821 | 1-339 |
| HLHSE61 | 111 | 503281 | AC006972 | 822 | 1-339 |
| HLHSE61 | 111 | 503281 | AC006984 | 823 | 1-338 |
| HLHSG28 | 112 | 503381 | AC011092 | 824 | 1-355 |
| HLHSI02 | 113 | 856983 | AC012479 | 825 | 1-463 |
| | | | | | 636-667 |
| HLHSI24 | 114 | 973701 | AC007262 | 826 | 1-659 |
| HLHSI24 | 114 | 973701 | AC007262 | 827 | 1-793 |
| HLHSI24 | 114 | 973701 | AC007262 | 828 | 1-314 |
| HLHSI51 | 115 | 526201 | AC068970 | 829 | 1-281 |
| HLHSK26 | 117 | 921007 | AC069004 | 830 | 1-118 |
| | | | | | 1146-2174 |
| HLHSK26 | 117 | 921007 | AC069004 | 831 | 1-475 |
| HLHSK41 | 118 | 522503 | AC034147 | 832 | 1-275 |
| HLHSK60 | 119 | 742366 | AC068219 | 833 | 1-321 |
| HLHSK60 | 119 | 742366 | AL031727 | 834 | 1-85 |
| | | | | | 3028-3657 |
| | | | | | 4843-4894 |
| | | | | | 6220-6330 |
| | | | | | 7547-8119 |
| | | | | | 8205-9384 |
| HLHSK60 | 119 | 742366 | AL359199 | 835 | 1-574 |
| HLHSK60 | 119 | 742366 | AL359199 | 836 | 1-99 |
| HLHSK60 | 119 | 742366 | AL031727 | 837 | 1-252 |
| HLHSL08 | 121 | 960393 | AC016771 | 838 | 1-469 |
| HLHSL08 | 121 | 960393 | AC016771 | 839 | 1-504 |
| HLHSL59 | 123 | 688076 | AL353782 | 840 | 1-471 |
| HLHSM15 | 126 | 519871 | AL158194 | 841 | 1-893 |
| | | | | | 1292-1829 |
| HLHSM15 | 126 | 519871 | AL136358 | 842 | 1-893 |
| | | | | | 1292-1844 |
| HLHSM65 | 129 | 753937 | AL359922 | 843 | 1-316 |
| HLHSM65 | 129 | 753937 | AL359922 | 844 | 1-690 |
| HLHSN51 | 132 | 503261 | AC074135 | 845 | 1-362 |
| HLHSN51 | 132 | 503261 | AC025886 | 846 | 1-362 |
| HLHSN51 | 132 | 503261 | AC021910 | 847 | 1-362 |
| HLHSP09 | 134 | 960889 | AP001319 | 848 | 1-359 |
| HLHSP09 | 134 | 960889 | AP000485 | 849 | 1-360 |
| HLHSP09 | 134 | 960889 | AP001319 | 850 | 1-128 |
| HLHSP09 | 134 | 960889 | AP000485 | 851 | 1-128 |
| HLHSP09 | 134 | 960889 | AP001319 | 852 | 1-348 |
| HLHSP09 | 134 | 960889 | AP000485 | 853 | 1-348 |
| HLHSP67 | 135 | 526203 | AC026968 | 854 | 1-137 |
| | | | | | 762-847 |
| | | | | | 1419-1504 |
| | | | | | 2605-2770 |
| | | | | | 3170-3530 |
| HLHSQ71 | 138 | 509073 | AL139426 | 855 | 1-739 |
| HLHSQ71 | 138 | 509073 | AL031284 | 856 | 1-739 |
| HLHSQ71 | 138 | 509073 | AL139426 | 857 | 1-1860 |
| HLHSQ71 | 138 | 509073 | AL139426 | 858 | 1-248 |
| HLHSQ71 | 138 | 509073 | AL031284 | 859 | 1-248 |
| HLHSQ71 | 138 | 509073 | AL031284 | 860 | 1-1860 |
| HLHSQ84 | 139 | 678457 | AC019206 | 861 | 1-89 |
| | | | | | 273-623 |
| | | | | | 628-782 |
| | | | | | 1600-1972 |
| | | | | | 2269-2662 |
| | | | | | 2664-2850 |
| | | | | | 3146-3457 |
| | | | | | 3939-4460 |
| | | | | | 4611-5429 |
| | | | | | 5567-5680 |
| | | | | | 6550-6611 |
| | | | | | 7133-7438 |
| | | | | | 7966-8096 |
| | | | | | 8725-9076 |
| | | | | | 9958-10046 |
| | | | | | 12069-12161 |
| | | | | | 17240-17379 |
| HLHSS07 | 140 | 954363 | AC007618 | 862 | 1-462 |
| HLHSS07 | 140 | 954363 | AC005866 | 863 | 1-462 |
| HLHSS07 | 140 | 954363 | AC007618 | 864 | 1-502 |
| HLHSS07 | 140 | 954363 | AC005866 | 865 | 1-502 |
| HLHST73 | 142 | 954914 | AC053497 | 866 | 1-492 |
| HLHSU30 | 143 | 933054 | AC022105 | 867 | 1-82 |
| | | | | | 5755-8272 |
| HLHSU30 | 143 | 933054 | AC010650 | 868 | 1-82 |
| | | | | | 5754-8268 |
| HLHSU30 | 143 | 933054 | AC022105 | 869 | 1-302 |
| HLHSU30 | 143 | 933054 | AC010650 | 870 | 1-302 |
| HLHSU75 | 144 | 961081 | AC064851 | 871 | 1-486 |
| HLHSU75 | 144 | 961081 | AC064851 | 872 | 1-330 |
| HLHSV08 | 145 | 973783 | AC068412 | 873 | 1-642 |
| HLHSV08 | 145 | 973783 | AC068920 | 874 | 1-642 |
| HLHSV08 | 145 | 973783 | AC068412 | 875 | 1-242 |
| HLHSV08 | 145 | 973783 | AC068920 | 876 | 1-242 |
| HLHSV82 | 147 | 526110 | AC034213 | 877 | 1-377 |
| HLHSX01 | 149 | 973523 | AL353603 | 878 | 1-591 |
| HLHSX01 | 149 | 973523 | AL390783 | 879 | 1-591 |
| HLHSZ60 | 151 | 522517 | AC005063 | 880 | 1-519 |
| HLHSZ60 | 151 | 522517 | AC002542 | 881 | 1-505 |
| HLHSZ60 | 151 | 522517 | AC005063 | 882 | 1-253 |
| HLHSZ60 | 151 | 522517 | AC005063 | 883 | 1-511 |
| HLHSZ60 | 151 | 522517 | AC002542 | 884 | 1-511 |
| HLHSZ60 | 151 | 522517 | AC002542 | 885 | 1-253 |
| HLHSZ69 | 152 | 526190 | AC024718 | 886 | 1-306 |
| HLHSZ69 | 152 | 526190 | AC024718 | 887 | 1-970 |
| HLHTA93 | 153 | 668792 | AC015667 | 888 | 1-260 |
| | | | | | 653-1707 |
| | | | | | 1720-2008 |
| | | | | | 2017-2776 |
| | | | | | 3782-4717 |
| HLHTA93 | 153 | 668792 | AL158207 | 889 | 1-260 |
| | | | | | 653-1707 |
| | | | | | 1720-2007 |
| | | | | | 2017-2776 |
| | | | | | 3782-4717 |
| HLHTA93 | 153 | 668792 | AC007936 | 890 | 1-1058 |
| | | | | | 1073-1359 |
| | | | | | 1372-2133 |
| | | | | | 3153-4094 |
| | | | | | 5092-5435 |
| | | | | | 5574-6960 |
| | | | | | 7103-8034 |
| HLHTA93 | 153 | 668792 | AL158207 | 891 | 1-319 |
| HLHTA93 | 153 | 668792 | AC007936 | 892 | 1-275 |
| HLHTC07 | 154 | 933057 | Z84478 | 893 | 1-360 |
| HLHTC07 | 154 | 933057 | Z84478 | 894 | 1-685 |
| HLHTC21 | 155 | 856980 | AC005746 | 895 | 1-683 |
| | | | | | 1792-2067 |
| | | | | | 3171-3320 |
| | | | | | 4529-4605 |
| | | | | | 4714-4877 |
| | | | | | 5310-5943 |
| | | | | | 7364-9581 |
| HLHTC21 | 155 | 856980 | AC005746 | 896 | 1-1492 |
| | | | | | 1927-1993 |
| | | | | | 3068-3402 |
| | | | | | 5782-6134 |
| HLHTC54 | 157 | 508050 | AP000822 | 897 | 1-1529 |
| HLHTC54 | 157 | 508050 | AP001812 | 898 | 1-1529 |
| HLHTC54 | 157 | 508050 | AC008102 | 899 | 1-1529 |
| HLHTC54 | 157 | 508050 | AC069080 | 900 | 1-1529 |
| HLHTC54 | 157 | 508050 | AP000822 | 901 | 1-378 |
| HLHTC54 | 157 | 508050 | AP001812 | 902 | 1-378 |
| HLHTC65 | 158 | 522510 | AC007790 | 903 | 1-481 |
| HLHTC65 | 158 | 522510 | AC009178 | 904 | 1-481 |
| HLHTC65 | 158 | 522510 | AC007790 | 905 | 1-389 |
| HLHTC65 | 158 | 522510 | AC007790 | 906 | 1-1026 |
| HLHTC65 | 158 | 522510 | AC009178 | 907 | 1-389 |
| HLHTC65 | 158 | 522510 | AC009178 | 908 | 1-1026 |
| HLHTD08 | 161 | 925491 | AL136963 | 909 | 1-420 |
| HLHTD61 | 162 | 856970 | AL357093 | 910 | 1-326 |
| HLHTD61 | 162 | 856970 | AL157736 | 911 | 1-326 |
| HLHTD61 | 162 | 856970 | AL357093 | 912 | 1-142 |
| HLHTD61 | 162 | 856970 | AL157736 | 913 | 1-142 |
| HLHTK72 | 163 | 509040 | AC021424 | 914 | 1-259 |
| HLHTK72 | 163 | 509040 | U90095 | 915 | 1-259 |
| HLHTK72 | 163 | 509040 | AC021424 | 916 | 1-495 |
| HLHTK72 | 163 | 509040 | U90095 | 917 | 1-493 |
| HLHTN36 | 166 | 508937 | AC020916 | 918 | 1-273 |
| HLHTN36 | 166 | 508937 | AC022098 | 919 | 1-273 |
| HLHTN36 | 166 | 508937 | AC020916 | 920 | 1-299 |
| HLHTN36 | 166 | 508937 | AC022098 | 921 | 1-321 |
| HLHTN36 | 166 | 508937 | AC020916 | 922 | 1-125 |
| HLHTN36 | 166 | 508937 | AC022098 | 923 | 1-125 |
| HLHTP70 | 168 | 525574 | AC067757 | 924 | 1-220 |
| HLHTP70 | 168 | 525574 | AC008081 | 925 | 1-345 |
| HLHTP70 | 168 | 525574 | AC008081 | 926 | 1-192 |
| HLHTP70 | 168 | 525574 | AC008081 | 927 | 1-249 |
| | | | | | 275-644 |
| HLJBE19 | 170 | 953727 | AC025396 | 928 | 1-281 |
| HLJBE19 | 170 | 953727 | AC025396 | 929 | 1-159 |
| HLJBE19 | 170 | 953727 | AC025396 | 930 | 1-226 |
| HLJDL84 | 172 | 782823 | AL357293 | 931 | 1-474 |
| HLJDL84 | 172 | 782823 | AL353607 | 932 | 1-474 |
| HLJDL84 | 172 | 782823 | AL357653 | 933 | 1-474 |
| HLJDZ49 | 173 | 923476 | AC067868 | 934 | 1-124 |
| HLJDZ49 | 173 | 923476 | AC067868 | 935 | 1-159 |
| HNLMB07 | 176 | 951944 | AC027125 | 936 | 1-393 |
| HNLMB07 | 176 | 951944 | AC020627 | 937 | 1-121 |
| | | | | | 308-506 |
| | | | | | 1488-2225 |
| | | | | | 2829-3221 |
| | | | | | 4455-4558 |
| HNLMB07 | 176 | 951944 | AC027125 | 938 | 1-646 |
| HNLMB07 | 176 | 951944 | AC020627 | 939 | 1-1131 |
| HLJEB53 | 177 | 727924 | AC010102 | 940 | 1-260 |
| | | | | | 2689-3516 |
| | | | | | 4245-4707 |
| | | | | | 5659-5767 |
| | | | | | 6158-6268 |
| | | | | | 6385-6488 |
| | | | | | 7828-9805 |
| | | | | | 10590-10733 |
| | | | | | 11376-11699 |
| | | | | | 12517-12695 |
| | | | | | 13595-14477 |
| | | | | | 16001-19518 |
| | | | | | 19991-20107 |
| | | | | | 23374-23626 |
| HLJEB53 | 177 | 727924 | AL109840 | 941 | 1-260 |
| | | | | | 2689-3516 |
| | | | | | 4245-4708 |
| | | | | | 5660-5768 |
| | | | | | 6159-6269 |
| | | | | | 6386-6489 |
| | | | | | 7829-9814 |
| | | | | | 10599-10742 |
| | | | | | 11385-11708 |
| | | | | | 12526-12704 |
| | | | | | 13604-14486 |
| | | | | | 16010-19527 |
| | | | | | 20000-20116 |
| | | | | | 23380-23632 |
| HLJDZ06 | 178 | 934837 | AC074374 | 942 | 1-119 |
| | | | | | 252-835 |
| HLJDZ06 | 178 | 934837 | AC026843 | 943 | 1-120 |
| | | | | | 253-836 |
| HLJDZ06 | 178 | 934837 | AC074374 | 944 | 1-348 |
| HLJDZ06 | 178 | 934837 | AC026843 | 945 | 1-349 |
| HLJDU56 | 179 | 853274 | AL138712 | 946 | 1-2359 |
| HLJDU56 | 179 | 853274 | AL138712 | 947 | 1-161 |
| | | | | | 2263-2922 |
| | | | | | 3418-3712 |
| | | | | | 4419-4857 |
| HLJDO57 | 181 | 734445 | AC007906 | 948 | 1-1300 |
| HLJDO57 | 181 | 734445 | AC007906 | 949 | 1-89 |
| HLJDN60 | 183 | 740061 | AC009944 | 950 | 1-1227 |
| HLJBR43 | 184 | 948850 | AC009019 | 951 | 1-106 |
| | | | | | 1924-2066 |
| | | | | | 2522-2880 |
| | | | | | 3547-3694 |
| | | | | | 4458-4609 |
| | | | | | 5714-5801 |
| | | | | | 6274-6398 |
| HLJBR43 | 184 | 948850 | AC009034 | 952 | 1-106 |
| | | | | | 1924-2066 |
| | | | | | 2522-2880 |
| | | | | | 3547-3694 |
| | | | | | 4069-4166 |
| | | | | | 4458-4609 |
| | | | | | 5714-5801 |
| | | | | | 6274-6398 |
| HLJBE22 | 185 | 674819 | AL160272 | 953 | 1-734 |
| HLJBE22 | 185 | 674819 | AL160272 | 954 | 1-814 |
| HLJBE22 | 185 | 674819 | AL160272 | 955 | 1-591 |
| | | | | | 1195-1499 |
| | | | | | 1777-2505 |
| HLHTJ69 | 187 | 753728 | AC025376 | 956 | 1-340 |
| HLHTJ69 | 187 | 753728 | AC022177 | 957 | 1-340 |
| HLHTJ69 | 187 | 753728 | AC025376 | 958 | 1-441 |
| HLHTJ69 | 187 | 753728 | AC022177 | 959 | 1-441 |
| HLHTD25 | 190 | 526239 | AC000039 | 960 | 1-550 |
| | | | | | 1735-1882 |
| | | | | | 2241-2522 |
| | | | | | 2550-4073 |
| | | | | | 4187-4690 |
| | | | | | 5057-5154 |
| | | | | | 5227-5850 |
| | | | | | 7379-7880 |
| HLHTD25 | 190 | 526239 | AL022326 | 961 | 1-550 |
| | | | | | 1735-1882 |
| | | | | | 2241-2522 |
| | | | | | 2550-4073 |
| | | | | | 4187-4690 |
| | | | | | 5227-5850 |
| | | | | | 7379-7880 |
| HLHTD25 | 190 | 526239 | AC000039 | 962 | 1-87 |
| HLHTD25 | 190 | 526239 | AC000039 | 963 | 1-2663 |
| HLHTD25 | 190 | 526239 | AL022326 | 964 | 1-141 |
| HLHTD25 | 190 | 526239 | AL022326 | 965 | 1-2663 |
| HLHSW56 | 191 | 507494 | AC022183 | 966 | 1-467 |
| | | | | | 1215-1795 |
| | | | | | 1817-2505 |
| HLHSW56 | 191 | 507494 | AP002000 | 967 | 1-467 |
| | | | | | 718-1288 |
| | | | | | 1292-1872 |
| | | | | | 1894-2405 |
| HLHSW56 | 191 | 507494 | AP002360 | 968 | 1-467 |
| | | | | | 718-1288 |
| | | | | | 1292-1872 |
| | | | | | 1894-2582 |
| HLHSW56 | 191 | 507494 | AP002000 | 969 | 1-334 |
| HLHSW56 | 191 | 507494 | AC022183 | 970 | 1-120 |
| HLHSW56 | 191 | 507494 | AP002360 | 971 | 1-501 |
| HLHSW56 | 191 | 507494 | AP002000 | 972 | 1-84 |
| HLHSW56 | 191 | 507494 | AP002360 | 973 | 1-334 |
| HLHQQ78 | 193 | 858508 | AC011043 | 974 | 1-712 |
| | | | | | 904-1867 |
| | | | | | 1874-1906 |
| | | | | | 2000-2124 |
| | | | | | 2337-3891 |
| HLHQQ78 | 193 | 858508 | AC011841 | 975 | 1-710 |
| | | | | | 902-1864 |
| | | | | | 1997-2121 |
| | | | | | 2334-3824 |
| | | | | | 4232-5905 |
| HLHQQ78 | 193 | 858508 | AC078939 | 976 | 1-646 |
| | | | | | 837-1797 |
| | | | | | 1804-1836 |
| | | | | | 1930-3820 |
| | | | | | 4161-5834 |
| HLHQQ78 | 193 | 858508 | AC011043 | 977 | 1-105 |
| HLHQQ78 | 193 | 858508 | AC011841 | 978 | 1-541 |
| HLHQQ78 | 193 | 858508 | AC011841 | 979 | 1-105 |
| HLHQQ78 | 193 | 858508 | AC078939 | 980 | 1-564 |
| HLHQQ78 | 193 | 858508 | AC078939 | 981 | 1-105 |
| HLHGH68 | 195 | 753110 | AC009720 | 982 | 1-1643 |
| HLHGD64 | 196 | 746698 | AC023336 | 983 | 1-419 |
| HLHGD64 | 196 | 746698 | AC011466 | 984 | 1-766 |
| HLHGD64 | 196 | 746698 | AC011212 | 985 | 1-766 |
| HLHGD64 | 196 | 746698 | AC011466 | 986 | 1-547 |
| | | | | | 765-1614 |
| HLHGD64 | 196 | 746698 | AC011212 | 987 | 1-547 |
| | | | | | 765-1614 |
| HLHFZ58 | 197 | 735318 | AC067737 | 988 | 1-793 |
| HLHFZ58 | 197 | 735318 | AC013797 | 989 | 1-793 |
| HLHFZ58 | 197 | 735318 | AL008726 | 990 | 1-128 |
| | | | | | 369-1330 |
| | | | | | 2428-2475 |
| | | | | | 2477-2708 |
| | | | | | 3566-4065 |
| | | | | | 4902-5161 |
| | | | | | 5321-5361 |
| | | | | | 5452-5677 |
| | | | | | 5727-5924 |
| | | | | | 6096-6204 |
| | | | | | 6338-6675 |
| | | | | | 6726-9997 |
| | | | | | 10021-10615 |
| | | | | | 11350-11441 |
| | | | | | 11903-12143 |
| | | | | | 14076-14381 |
| | | | | | 14418-15321 |
| | | | | | 16488-16885 |
| | | | | | 17242-18034 |
| | | | | | 19610-20177 |
| | | | | | 20388-20418 |
| | | | | | 20437-20628 |
| | | | | | 21348-21482 |
| | | | | | 21831-21941 |
| | | | | | 23215-23580 |
| HLHFZ58 | 197 | 735318 | AC067737 | 991 | 1-568 |
| | | | | | 779-809 |
| | | | | | 828-1061 |
| | | | | | 1737-1871 |
| | | | | | 2220-2330 |
| | | | | | 3603-3968 |
| HLHFZ58 | 197 | 735318 | AL008726 | 992 | 1-672 |
| HLHFS01 | 199 | 916779 | AC022751 | 993 | 1-379 |
| HLHFS01 | 199 | 916779 | AC021948 | 994 | 1-730 |
| HLHFS01 | 199 | 916779 | AC021948 | 995 | 1-388 |
| HLHFM25 | 200 | 840141 | AC016719 | 996 | 1-505 |
| | | | | | 792-1257 |
| HLHEM25 | 200 | 840141 | AC016719 | 997 | 1-290 |
| HLHFC11 | 202 | 967254 | AL158172 | 998 | 1-468 |
| HLHEX07 | 205 | 953548 | AL355822 | 999 | 1-325 |
| | | | | | 1890-2039 |
| | | | | | 3690-4343 |
| | | | | | 4955-5403 |
| | | | | | 5459-5989 |
| HLHEX07 | 205 | 953548 | AL355822 | 1000 | 1-317 |
| HLHET59 | 206 | 857001 | AC022744 | 1001 | 1-420 |
| | | | | | 1335-1931 |
| | | | | | 2457-3091 |
| HLHET59 | 206 | 857001 | AC009588 | 1002 | 1-420 |
| | | | | | 1335-1931 |
| | | | | | 2457-3091 |
| HLHET59 | 206 | 857001 | AC022744 | 1003 | 1-2089 |
| HLHET59 | 206 | 857001 | AC022744 | 1004 | 1-180 |
| HLHET59 | 206 | 857001 | AC009588 | 1005 | 1-174 |
| HLHET59 | 206 | 857001 | AC009588 | 1006 | 1-2016 |
| HLHEP02 | 208 | 920385 | AL159994 | 1007 | 1-925 |
| HLHEP02 | 208 | 920385 | AL159994 | 1008 | 1-291 |
| HLHEO70 | 209 | 576526 | AC022839 | 1009 | 1-243 |
| HLHEO70 | 209 | 576526 | AC025712 | 1010 | 1-243 |
| HLHEO70 | 209 | 576526 | AC022839 | 1011 | 1-236 |
| HLHEO70 | 209 | 576526 | AC025712 | 1012 | 1-236 |
| HLHEN10 | 210 | 964868 | AC006375 | 1013 | 1-843 |
| HLHDS57 | 212 | 735102 | AC023373 | 1014 | 1-1213 |
| HLHDS57 | 212 | 735102 | AC016285 | 1015 | 1-1213 |
| HLHDS57 | 212 | 735102 | AC023373 | 1016 | 1-497 |
| HLHDS57 | 212 | 735102 | AC016285 | 1017 | 1-497 |
| HLHDP11 | 213 | 967751 | AL031705 | 1018 | 1-199 |
| | | | | | 438-641 |
| | | | | | 833-1206 |
| | | | | | 1935-2216 |
| | | | | | 3355-3756 |
| | | | | | 3951-4099 |
| | | | | | 4672-4787 |
| | | | | | 5311-5982 |
| | | | | | 5985-6190 |
| | | | | | 6685-6756 |
| | | | | | 6939-7078 |
| | | | | | 7152-7289 |
| | | | | | 8010-8088 |
| | | | | | 8252-8364 |
| | | | | | 8603-9040 |
| | | | | | 9233-9354 |
| | | | | | 9520-10079 |
| | | | | | 10186-10600 |
| | | | | | 11135-11402 |
| | | | | | 12002-12192 |
| | | | | | 12826-12920 |
| | | | | | 13045-13644 |
| | | | | | 13899-13967 |
| | | | | | 14044-14474 |
| | | | | | 15037-15351 |
| | | | | | 15563-15725 |
| | | | | | 15964-16330 |
| | | | | | 16337-17729 |
| | | | | | 17758-18385 |
| HLHDP11 | 213 | 967751 | AL031705 | 1019 | 1-303 |
| HLHDP11 | 213 | 967751 | AL031705 | 1020 | 1-126 |
| HLHDO38 | 214 | 709147 | AC019072 | 1021 | 1-524 |
| HLHDM69 | 215 | 529681 | AL121936 | 1022 | 1-743 |
| | | | | | 951-1451 |
| | | | | | 1486-1978 |
| | | | | | 2692-2885 |
| | | | | | 4755-4787 |
| | | | | | 5534-5879 |
| | | | | | 6578-8746 |
| HLHDM69 | 215 | 529681 | AL121936 | 1023 | 1-140 |
| HLHDM43 | 216 | 529683 | AC024514 | 1024 | 1-44 |
| | | | | | 1617-1680 |
| | | | | | 3465-4172 |
| HLHDM43 | 216 | 529683 | AC024514 | 1025 | 1-389 |
| HLHDL25 | 218 | 857012 | AC022147 | 1026 | 1-118 |
| HLHDL25 | 218 | 857012 | AC022147 | 1027 | 1-300 |
| HLHDD37 | 220 | 529187 | AL359674 | 1028 | 1-385 |
| HLHDD37 | 220 | 529187 | AL390728 | 1029 | 1-258 |
| | | | | | 1191-1302 |
| | | | | | 2014-2327 |
| | | | | | 2621-3256 |
| | | | | | 3603-4341 |
| | | | | | 4632-5394 |
| | | | | | 5717-6040 |
| HLHDD37 | 220 | 529187 | AL390728 | 1030 | 1-282 |
| HLHCT68 | 223 | 764745 | AC010344 | 1031 | 1-121 |
| | | | | | 2321-2645 |
| | | | | | 5406-5532 |
| | | | | | 2985-3815 |
| | | | | | 4282-4423 |
| HLHCT68 | 223 | 764745 | AC008496 | 1032 | 1-96 |
| | | | | | 5545-5688 |
| | | | | | 6055-6205 |
| | | | | | 9065-9895 |
| | | | | | 10362-10503 |
| HLHCT68 | 223 | 764745 | AC010344 | 1033 | 1-144 |
| HLHCT68 | 223 | 764745 | AC010344 | 1034 | 1-2396 |
| HLHCT68 | 223 | 764745 | AC008496 | 1035 | 1-1684 |
| HLHCN77 | 224 | 530617 | AC024631 | 1036 | 1-246 |
| HLHCN77 | 224 | 530617 | AC024631 | 1037 | 1-103 |
| HLHCN77 | 224 | 530617 | AC024631 | 1038 | 1-385 |
| HLHCN64 | 225 | 530621 | AC011883 | 1039 | 1-261 |
| HLHCN64 | 225 | 530621 | AC008507 | 1040 | 1-261 |
| HLHCN64 | 225 | 530621 | AC011883 | 1041 | 1-647 |
| HLHCN64 | 225 | 530621 | AC008507 | 1042 | 1-416 |
| | | | | | 2232-2522 |
| | | | | | 3574-3959 |
| | | | | | 5759-6083 |
| | | | | | 6157-6534 |
| | | | | | 7148-7794 |
| HLHCN05 | 226 | 932023 | AC010192 | 1043 | 1-638 |
| HLHCN05 | 226 | 932023 | AC010192 | 1044 | 1-444 |
| HLHCN05 | 226 | 932023 | AC010192 | 1045 | 1-68 |
| | | | | | 319-458 |
| HLHCL93 | 228 | 530624 | AC073394 | 1046 | 1-206 |
| | | | | | 758-961 |
| | | | | | 1429-1539 |
| | | | | | 2003-2202 |
| | | | | | 2227-2541 |
| | | | | | 2790-3005 |
| | | | | | 4045-4252 |
| | | | | | 9988-10356 |
| | | | | | 11959-12072 |
| | | | | | 14879-15003 |
| | | | | | 15122-15266 |
| | | | | | 15341-15739 |
| | | | | | 17016-17146 |
| | | | | | 17196-17629 |
| | | | | | 19745-20622 |
| | | | | | 21130-21547 |
| | | | | | 22795-22927 |
| | | | | | 22964-23758 |
| | | | | | 23918-27148 |
| HLHCL93 | 228 | 530624 | AL122034 | 1047 | 1-795 |
| HLHCL93 | 228 | 530624 | AL122034 | 1048 | 1-2755 |
| HLHCL93 | 228 | 530624 | AL122034 | 1049 | 1-158 |
| HLHCD27 | 234 | 521947 | AC073970 | 1050 | 1-214 |
| HLHCD27 | 234 | 521947 | AC002401 | 1051 | 1-215 |
| HLHCD27 | 234 | 521947 | AC073970 | 1052 | 1-84 |
| HLHCD27 | 234 | 521947 | AC002401 | 1053 | 1-84 |
| HLHCC63 | 235 | 668121 | AL158068 | 1054 | 1-170 |
| | | | | | 249-364 |
| | | | | | 2497-2721 |
| | | | | | 3026-3203 |
| | | | | | 4070-4101 |
| | | | | | 5129-5260 |
| | | | | | 6321-8103 |
| | | | | | 8143-9360 |
| | | | | | 9560-9677 |
| | | | | | 10373-14654 |
| HLHCC63 | 235 | 668121 | AL158068 | 1055 | 1-566 |
| HLHBA66 | 238 | 909927 | AC016907 | 1056 | 1-553 |
| HLHBA66 | 238 | 909927 | AC018891 | 1057 | 1-97 |
| | | | | | 852-966 |
| | | | | | 991-1233 |
| | | | | | 1785-1887 |
| | | | | | 2409-2472 |
| | | | | | 3986-4069 |
| | | | | | 4422-4565 |
| | | | | | 5443-5870 |
| | | | | | 6635-7035 |
| | | | | | 7298-7636 |
| | | | | | 8666-9106 |
| | | | | | 11004-11563 |
| | | | | | 11922-12041 |
| | | | | | 12277-12824 |
| | | | | | 13547-13781 |
| | | | | | 13848-14214 |
| | | | | | 14451-14533 |
| | | | | | 14990-15366 |
| HLHBA66 | 238 | 909927 | AC016907 | 1058 | 1-140 |
| HLHBA66 | 238 | 909927 | AC016907 | 1059 | 1-548 |
| HLHAR03 | 240 | 960953 | AC007040 | 1060 | 1-616 |
| HLHAR03 | 240 | 960953 | AC007040 | 1061 | 1-640 |
| HLHAM01 | 241 | 961084 | AF146367 | 1062 | 1-565 |
| HLHAM01 | 241 | 961084 | AF216665 | 1063 | 1-807 |
| | | | | | 3253-3354 |
| | | | | | 3465-3521 |
| | | | | | 3575-4139 |
| HLHAM01 | 241 | 961084 | AF124523 | 1064 | 1-807 |
| | | | | | 3465-3521 |
| | | | | | 3575-4139 |
| HLHAM01 | 241 | 961084 | AF118808 | 1065 | 1-565 |
| HLHAM01 | 241 | 961084 | AF146367 | 1066 | 1-2095 |
| | | | | | 2213-2603 |
| | | | | | 3290-3683 |
| | | | | | 4388-4521 |
| | | | | | 5849-6511 |
| HLHAM01 | 241 | 961084 | AF146367 | 1067 | 1-102 |
| HLHAM01 | 241 | 961084 | AF216665 | 1068 | 1-258 |
| HLHAM01 | 241 | 961084 | AF216665 | 1069 | 1-2095 |
| | | | | | 2213-2603 |
| | | | | | 3290-3683 |
| | | | | | 4388-4521 |
| | | | | | 4985-5114 |
| | | | | | 5538-5595 |
| | | | | | 5866-6177 |
| | | | | | 8879-8991 |
| | | | | | 9181-9691 |
| | | | | | 9930-10061 |
| HLHAM01 | 241 | 961084 | AF124523 | 1070 | 1-258 |
| HLHAM01 | 241 | 961084 | AF124523 | 1071 | 1-2095 |
| | | | | | 2213-2603 |
| | | | | | 3290-3683 |
| | | | | | 4388-4521 |
| | | | | | 4985-5110 |
| | | | | | 5516-5577 |
| | | | | | 5849-6511 |
| | | | | | 6551-6923 |
| | | | | | 7146-7610 |
| | | | | | 8038-8107 |
| | | | | | 8134-8246 |
| | | | | | 8376-8402 |
| | | | | | 8436-8946 |
| | | | | | 9185-9316 |
| HLHAM01 | 241 | 961084 | AF118808 | 1072 | 1-2095 |
| | | | | | 2213-2603 |
| | | | | | 3290-3683 |
| | | | | | 4388-4521 |
| | | | | | 5849-6511 |
| HLHAM01 | 241 | 961084 | AF118808 | 1073 | 1-102 |
| HLHAD02 | 242 | 921354 | AC011372 | 1074 | 1-74 |
| | | | | | 628-1615 |
| HLFBM20 | 247 | 503816 | AC007906 | 1075 | 1-717 |
| | | | | | 3837-4318 |
| | | | | | 5239-6186 |
| HLFBM20 | 247 | 503816 | AC007346 | 1076 | 1-717 |
| | | | | | 4075-4377 |
| | | | | | 5244-6191 |
| HLFBM20 | 247 | 503816 | AC007492 | 1077 | 1-717 |
| | | | | | 4075-4313 |
| | | | | | 5266-6191 |
| HLFBM20 | 247 | 503816 | AC007906 | 1078 | 1-337 |
| HLFBM20 | 247 | 503816 | AC007346 | 1079 | 1-337 |
| HLFBM20 | 247 | 503816 | AC007492 | 1080 | 1-337 |
| HLFBI37 | 249 | 503820 | AC018906 | 1081 | 1-208 |
| HLFBI37 | 249 | 503820 | AC018906 | 1082 | 1-340 |
| HLFBH89 | 250 | 503823 | AC023974 | 1083 | 1-447 |
| HLPBH89 | 250 | 503823 | AC023974 | 1084 | 1-446 |
| HLFBH89 | 250 | 503823 | AC008548 | 1085 | 1-446 |
| HLFBH68 | 251 | 753855 | AC010939 | 1086 | 1-375 |
| HLFBH68 | 251 | 753855 | AL359400 | 1087 | 1-375 |
| HLFBH68 | 251 | 753855 | AC010939 | 1088 | 1-301 |
| HLFBH68 | 251 | 753855 | AL359400 | 1089 | 1-301 |
| HLFBH31 | 253 | 693525 | AL389886 | 1090 | 1-538 |
| HLFBH31 | 253 | 693525 | AL389886 | 1091 | 1-84 |
| | | | | | 1034-1528 |
| | | | | | 1715-2023 |
| | | | | | 3809-4257 |
| | | | | | 4947-5077 |
| | | | | | 5770-5909 |
| | | | | | 6963-7076 |
| | | | | | 8082-8116 |
| | | | | | 8473-8564 |
| | | | | | 8597-8886 |
| | | | | | 10021-10058 |
| | | | | | 10649-15500 |
| HLFBH31 | 253 | 693525 | AL389886 | 1092 | 1-349 |
| HLFBH20 | 254 | 504051 | AL121952 | 1093 | 1-481 |
| HLFBH20 | 254 | 504051 | AL121952 | 1094 | 1-432 |
| HLFBG45 | 255 | 716946 | AC055855 | 1095 | 1-222 |
| | | | | | 778-874 |
| | | | | | 2007-2531 |
| | | | | | 2683-3584 |
| HLFBG45 | 255 | 716946 | AC011276 | 1096 | 1-222 |
| | | | | | 778-874 |
| | | | | | 2007-2531 |
| | | | | | 2683-3583 |
| | | | | | 3651-3845 |
| | | | | | 4762-4902 |
| | | | | | 4905-5042 |
| | | | | | 5071-5265 |
| | | | | | 6255-6412 |
| | | | | | 6506-7310 |
| | | | | | 7442-8824 |
| | | | | | 9163-9610 |
| | | | | | 9617-9757 |
| | | | | | 9817-11185 |
| HLFBG45 | 255 | 716946 | AC055855 | 1097 | 1-195 |
| HLFBG45 | 255 | 716946 | AC011276 | 1098 | 1-689 |
| HLFBG21 | 256 | 504052 | AC021654 | 1099 | 1-197 |
| HLFBG21 | 256 | 504052 | AC025982 | 1100 | 1-197 |
| HLFBE01 | 257 | 961087 | AC072028 | 1101 | 1-171 |
| HLFBD79 | 258 | 509799 | AC010321 | 1102 | 1-94 |
| | | | | | 104-541 |
| | | | | | 695-835 |
| | | | | | 3763-4195 |
| | | | | | 4316-4512 |
| | | | | | 4520-4874 |
| | | | | | 6000-6104 |
| | | | | | 6210-6550 |
| | | | | | 6591-7089 |
| | | | | | 7586-7684 |
| | | | | | 7812-7888 |
| | | | | | 7997-8052 |
| | | | | | 9185-9250 |
| | | | | | 11528-11896 |
| | | | | | 12182-12284 |
| | | | | | 12558-13045 |
| | | | | | 13134-14888 |
| | | | | | 14978-17252 |
| HLFBD79 | 258 | 509799 | AC010321 | 1103 | 1-783 |
| | | | | | 1552-2196 |
| HLFBD79 | 258 | 509799 | AC010321 | 1104 | 1-1946 |
| HLFBD39 | 259 | 792908 | AC073131 | 1105 | 1-192 |
| | | | | | 329-470 |
| | | | | | 696-894 |
| | | | | | 2365-3566 |
| HLFBD39 | 259 | 792908 | AC008403 | 1106 | 1-369 |
| | | | | | 559-677 |
| | | | | | 853-1020 |
| | | | | | 1255-1377 |
| | | | | | 2778-3257 |
| | | | | | 3913-4703 |
| | | | | | 4840-4982 |
| | | | | | 5208-5406 |
| | | | | | 6878-8082 |
| HLFBD39 | 259 | 792908 | AC008403 | 1107 | 1-466 |
| HLFBD23 | 260 | 509802 | AC007546 | 1108 | 1-103 |
| | | | | | 1091-1218 |
| | | | | | 1856-2074 |
| | | | | | 2112-2398 |
| | | | | | 2749-2937 |
| | | | | | 4357-4400 |
| | | | | | 5823-5913 |
| | | | | | 6287-6977 |
| | | | | | 7105-7443 |
| | | | | | 8618-8818 |
| | | | | | 9074-9299 |
| | | | | | 10264-12381 |
| | | | | | 12541-13026 |
| | | | | | 13249-13333 |
| | | | | | 13355-14023 |
| | | | | | 14447-14788 |
| | | | | | 14908-15500 |
| | | | | | 15562-16612 |
| | | | | | 17335-17834 |
| | | | | | 18610-18726 |
| | | | | | 21062-21312 |
| | | | | | 21764-21927 |
| | | | | | 24230-24297 |
| | | | | | 25325-27507 |
| | | | | | 27761-28166 |
| | | | | | 28198-28323 |
| | | | | | 29007-30428 |
| | | | | | 31322-31453 |
| | | | | | 32388-32501 |
| | | | | | 36331-36501 |
| HLFBD23 | 260 | 509802 | AC040979 | 1109 | 1-691 |
| | | | | | 819-1158 |
| | | | | | 2333-2533 |
| | | | | | 2789-3014 |
| | | | | | 3110-3211 |
| | | | | | 3641-6097 |
| | | | | | 6257-7059 |
| | | | | | 7071-7662 |
| HLFBD23 | 260 | 509802 | AC007546 | 1110 | 1-258 |
| HLFBD23 | 260 | 509802 | AC040979 | 1111 | 1-284 |
| HLFBD23 | 260 | 509802 | AC007546 | 1112 | 1-143 |
| | | | | | 204-922 |
| HLFBC56 | 262 | 504068 | AL136458 | 1113 | 1-294 |
| | | | | | 506-707 |
| | | | | | 1776-2011 |
| | | | | | 2535-4755 |
| | | | | | 5405-5870 |
| | | | | | 5873-6187 |
| | | | | | 7245-7361 |
| | | | | | 7501-7967 |
| | | | | | 9091-9694 |
| | | | | | 9825-10069 |
| | | | | | 10913-11066 |
| | | | | | 11815-12127 |
| HLFBC56 | 262 | 504068 | AL162739 | 1114 | 1-2221 |
| | | | | | 2871-3336 |
| | | | | | 3339-3653 |
| | | | | | 4711-4827 |
| HLFBC56 | 262 | 504068 | AL136458 | 1115 | 1-112 |
| HLFBC56 | 262 | 504068 | AL162739 | 1116 | 1-467 |
| HLFBC56 | 262 | 504068 | AL162739 | 1117 | 1-236 |
| HLFBC39 | 263 | 504073 | AC005015 | 1118 | 1-449 |
| HLFBC39 | 263 | 504073 | AC005015 | 1119 | 1-268 |
| HLFBC39 | 263 | 504073 | AC005015 | 1120 | 1-138 |
| HLFBC36 | 264 | 708000 | AF166490 | 1121 | 1-886 |
| HLFBC36 | 264 | 708000 | AC008165 | 1122 | 1-886 |
| HLFBA62 | 267 | 504074 | AC074010 | 1123 | 1-509 |
| HLFBA62 | 267 | 504074 | AC018645 | 1124 | 1-508 |
| HLFBA62 | 267 | 504074 | AC007276 | 1125 | 1-509 |
| HLFBA62 | 267 | 504074 | AC074010 | 1126 | 1-653 |
| HLFBA62 | 267 | 504074 | AC074010 | 1127 | 1-561 |
| HLFBA62 | 267 | 504074 | AC018645 | 1128 | 1-653 |
| HLFBA62 | 267 | 504074 | AC018645 | 1129 | 1-560 |
| HLFBA62 | 267 | 504074 | AC007276 | 1130 | 1-561 |
| HLFBA62 | 267 | 504074 | AC007276 | 1131 | 1-653 |
| HLFAA06 | 268 | 960815 | AC074101 | 1132 | 1-596 |
| HIPAP03 | 269 | 922537 | AC025853 | 1133 | 1-54 |
| | | | | | 1306-1915 |
| | | | | | 2054-2411 |
| HIPAA05 | 271 | 930848 | AC006512 | 1134 | 1-247 |
| | | | | | 2729-2975 |
| | | | | | 3787-3952 |
| | | | | | 2812-2918 |
| | | | | | 3488-3953 |
| | | | | | 3964-4527 |
| | | | | | 4683-5151 |
| | | | | | 5330-9121 |
| | | | | | 9884-10335 |
| | | | | | 10748-10781 |
| | | | | | 10960-11055 |
| | | | | | 11323-12111 |
| | | | | | 12127-12791 |
| | | | | | 12911-13262 |
| | | | | | 13266-13791 |
| | | | | | 14696-14866 |
| | | | | | 15107-15207 |
| | | | | | 16551-16955 |
| | | | | | 17174-17614 |
| | | | | | 18504-18749 |
| | | | | | 19392-19660 |
| | | | | | 19720-20075 |
| | | | | | 20785-21233 |
| | | | | | 21290-21733 |
| | | | | | 23618-23649 |
| | | | | | 23982-24188 |
| | | | | | 24481-24573 |
| | | | | | 24741-25003 |
| | | | | | 26591-26705 |
| | | | | | 26738-27249 |
| | | | | | 28479-28858 |
| | | | | | 29065-31669 |
| | | | | | 31926-32887 |
| | | | | | 33667-34293 |
| | | | | | 35229-35682 |
| | | | | | 38114-38771 |
| HIPAA05 | 271 | 930848 | U47924 | 1135 | 1-3792 |
| | | | | | 4555-5006 |
| | | | | | 5418-5451 |
| | | | | | 5630-5725 |
| | | | | | 5993-6781 |
| | | | | | 6797-7461 |
| HIPAA05 | 271 | 930848 | AC006512 | 1136 | 1-818 |
| | | | | | 963-1440 |
| | | | | | 1469-1958 |
| | | | | | 2220-3076 |
| | | | | | 3455-3663 |
| | | | | | 3931-4285 |
| | | | | | 4549-4632 |
| | | | | | 4696-5069 |
| | | | | | 5245-5337 |
| | | | | | 5461-5775 |
| HIPAA05 | 271 | 930848 | AC006512 | 1137 | 1-738 |
| HIPAA05 | 271 | 930848 | U47924 | 1138 | 1-246 |
| | | | | | 3963-4526 |
| | | | | | 4682-5150 |
| HIPAA05 | 271 | 930848 | U47924 | 1139 | 1-352 |
| HIDAF76 | 273 | 857563 | AC068333 | 1140 | 1-893 |
| HIDAF76 | 273 | 857563 | AC068333 | 1141 | 1-278 |
| HIDAF76 | 273 | 857563 | AC068333 | 1142 | 1-472 |
| HIDAE12 | 274 | 968936 | AL359634 | 1143 | 1-756 |
| HIDAE12 | 274 | 968936 | AL132874 | 1144 | 1-767 |
| HIDAE12 | 274 | 968936 | AL121656 | 1145 | 1-336 |
| | | | | | 465-1681 |
| | | | | | 1822-4167 |
| HIDAE12 | 274 | 968936 | AL365275 | 1146 | 1-756 |
| HIDAA03 | 275 | 922105 | AL359876 | 1147 | 1-123 |
| | | | | | 479-615 |
| | | | | | 3610-4005 |
| | | | | | 4246-4410 |
| | | | | | 4759-4916 |
| | | | | | 5688-5934 |
| | | | | | 8229-8299 |
| | | | | | 9464-9525 |
| | | | | | 9981-10080 |
| | | | | | 11047-11503 |
| | | | | | 12069-12185 |
| | | | | | 13123-13590 |
| | | | | | 15144-15585 |
| | | | | | 15871-16398 |
| | | | | | 16700-17435 |
| | | | | | 18190-18338 |
| | | | | | 18645-19119 |
| | | | | | 19697-20375 |
| | | | | | 20846-21174 |
| | | | | | 21284-21829 |
| | | | | | 21835-22007 |
| | | | | | 22129-22276 |
| | | | | | 22901-25279 |
| HIDAA03 | 275 | 922105 | AL137800 | 1148 | 1-123 |
| | | | | | 479-615 |
| | | | | | 3610-4005 |
| | | | | | 4246-4410 |
| | | | | | 4759-4916 |
| | | | | | 5688-5934 |
| | | | | | 8229-8299 |
| | | | | | 9464-9525 |
| | | | | | 11047-11503 |
| | | | | | 12069-12185 |
| | | | | | 13123-13590 |
| | | | | | 15142-15583 |
| | | | | | 15869-16396 |
| | | | | | 16698-17433 |
| | | | | | 18188-18336 |
| | | | | | 18643-19117 |
| | | | | | 19695-20373 |
| | | | | | 20844-21172 |
| | | | | | 21282-21827 |
| | | | | | 21833-22005 |
| | | | | | 22127-22274 |
| | | | | | 22899-25277 |
| HIDAA03 | 275 | 922105 | AL359876 | 1149 | 1-567 |
| HIDAA03 | 275 | 922105 | AL137800 | 1150 | 1-567 |
| HCLSA35 | 277 | 706334 | AC006511 | 1151 | 1-508 |
| HCLSA35 | 277 | 706334 | AC006511 | 1152 | 1-145 |
| HCLSA35 | 277 | 706334 | AC006511 | 1153 | 1-122 |
| HCLCO10 | 278 | 963683 | AC026436 | 1154 | 1-155 |
| | | | | | 1656-2026 |
| | | | | | 2386-2935 |
| HCLCO10 | 278 | 963683 | AC026436 | 1155 | 1-315 |
| HCLCO10 | 278 | 963683 | AC026436 | 1156 | 1-416 |
| | | | | | 492-945 |
| | | | | | 1439-2562 |
| | | | | | 2697-3294 |
| HCLCM46 | 279 | 718611 | AC010680 | 1157 | 1-264 |
| | | | | | 287-463 |
| | | | | | 2099-2437 |
| HCLCM46 | 279 | 718611 | AC010680 | 1158 | 1-230 |
| | | | | | 523-1327 |
| | | | | | 1338-2091 |
| | | | | | 2947-3016 |
| HCLCM46 | 279 | 718611 | AC010680 | 1159 | 1-116 |
| | | | | | 231-431 |
| | | | | | 2708-3143 |
| | | | | | 5440-5512 |
| | | | | | 5960-6110 |
| | | | | | 6176-6558 |
| | | | | | 6601-6717 |
| | | | | | 6857-6898 |
| | | | | | 7007-7189 |
| HCLCM45 | 280 | 717294 | AC008053 | 1160 | 1-234 |
| | | | | | 265-715 |
| HCLBY11 | 281 | 966262 | AC025743 | 1161 | 1-1193 |
| HCLBY11 | 281 | 966262 | AL121672 | 1162 | 1-1193 |
| HCLBY11 | 281 | 966262 | AC025743 | 1163 | 1-761 |
| HCLBY11 | 281 | 966262 | AC025743 | 1164 | 1-122 |
| HCLBY11 | 281 | 966262 | AL121672 | 1165 | 1-137 |
| HCLBY11 | 281 | 966262 | AL121672 | 1166 | 1-761 |
| HCLBW86 | 282 | 785116 | AC074032 | 1167 | 1-1666 |
| | | | | | 1783-2591 |
| | | | | | 3023-3196 |
| | | | | | 3201-3364 |
| | | | | | 3447-4235 |
| | | | | | 4425-4558 |
| | | | | | 4895-5530 |
| HCLBW86 | 282 | 785116 | AC074032 | 1168 | 1-188 |
| HCLBQ23 | 284 | 675476 | AC005477 | 1169 | 1-644 |
| | | | | | 756-1242 |
| HCLBH93 | 285 | 791947 | AL137849 | 1170 | 1-634 |
| | | | | | 799-835 |
| HCLBH93 | 285 | 791947 | AL137849 | 1171 | 1-126 |
| HCLBE41 | 286 | 711947 | AC027288 | 1172 | 1-790 |
| | | | | | 1048-1568 |
| HCLBE41 | 286 | 711947 | AC027288 | 1173 | 1-228 |
| HCLBE41 | 286 | 711947 | AC027288 | 1174 | 1-516 |
| HCLBD23 | 288 | 675477 | AP000452 | 1175 | 1-679 |
| HCLBD23 | 288 | 675477 | AP000465 | 1176 | 1-679 |
| HCLBD23 | 288 | 675477 | AB017654 | 1177 | 1-679 |
| HCLBD23 | 288 | 675477 | AB017654 | 1178 | 1-97 |
| HCLBA05 | 289 | 931988 | AP001010 | 1179 | 1-1190 |
| | | | | | 1245-2401 |
| HCLBA05 | 289 | 931988 | AP001010 | 1180 | 1-365 |
| HBHMI94 | 290 | 794055 | AC069063 | 1181 | 1-521 |
| | | | | | 857-1404 |
| | | | | | 2429-2755 |
| HBHMH91 | 291 | 789520 | AC006477 | 1182 | 1-1150 |
| HBHMH91 | 291 | 789520 | AC007000 | 1183 | 1-1147 |
| HBHMH91 | 291 | 789520 | AC006477 | 1184 | 1-593 |
| HBHMH91 | 291 | 789520 | AC006477 | 1185 | 1-47 |
| | | | | | 1869-2893 |
| | | | | | 3234-3561 |
| | | | | | 4852-4896 |
| | | | | | 5290-5521 |
| | | | | | 5985-6209 |
| HBHMH91 | 291 | 789520 | AC007000 | 1186 | 1-592 |
| HAABL43 | 293 | 968966 | AC015720 | 1187 | 1-255 |
| | | | | | 778-936 |
| | | | | | 1553-1803 |
| | | | | | 2274-2578 |
| | | | | | 2651-2918 |
| | | | | | 3178-4259 |
| | | | | | 4880-5282 |
| | | | | | 6659-6990 |
| | | | | | 7234-8993 |
| | | | | | 10292-10975 |
| | | | | | 11813-11842 |
| HAABL43 | 293 | 968966 | AC015720 | 1188 | 1-268 |
| HAABL43 | 293 | 968966 | AC015720 | 1189 | 1-479 |
| HAAAN12 | 295 | 969399 | AL032821 | 1190 | 1-719 |
| | | | | | 728-754 |
| | | | | | 1229-1702 |
| | | | | | 1950-2099 |
| | | | | | 2517-2801 |
| | | | | | 2849-3016 |
| | | | | | 3650-4436 |
| | | | | | 4474-6500 |
| HAAAM04 | 296 | 926254 | AC016310 | 1191 | 1-531 |
| HAAAM04 | 296 | 926254 | AC016310 | 1192 | 1-1198 |
| HAAAM04 | 296 | 926254 | AC016310 | 1193 | 1-248 |
| | | | | | 598-1672 |
| HA5BM21 | 297 | 909795 | AC024047 | 1194 | 1-163 |
| | | | | | 244-390 |
| HASAK05 | 298 | 930739 | AC007938 | 1195 | 1-1964 |
| HASAK05 | 298 | 930739 | AC007938 | 1196 | 1-140 |
| | | | | | 1905-2052 |
| | | | | | 2527-2920 |
| | | | | | 3885-4000 |
| | | | | | 4450-4668 |
| | | | | | 5362-8593 |
| HA5AG86 | 299 | 952440 | AC016992 | 1197 | 1-29 |
| | | | | | 969-2332 |
| HA5AG86 | 299 | 952440 | AC016992 | 1198 | 1-669 |

[0067] Table 1B summarizes additional polynucleotides encompassed by the invention (including cDNA clones related to the sequences (Clone ID NO:Z), contig sequences (contig identifier (Contig ID:) contig nucleotide sequence identifiers (SEQ ID NO:X)), and genomic sequences (SEQ ID NO:B). The first column provides a unique clone identifier, “Clone ID NO:Z”, for a cDNA clone related to each contig sequence. The second column provides the sequence identifier, “SEQ ID NO:X”, for each contig sequence. The third column provides a unique contig identifier, “Contig ID:” for each contig sequence. The fourth column, provides a BAC identifier “BAC ID NO:A” for the BAC clone referenced in the corresponding row of the table. The fifth column provides the nucleotide sequence identifier, “SEQ ID NO:B” for a fragment of the BAC clone identified in column four of the corresponding row of the table. The sixth column, “Exon From-To”, provides the location (i.e., nucleotide position numbers) within the polynucleotide sequence of SEQ ID NO:B which delineate certain polynucleotides of the invention that are also exemplary members of polynucleotide sequences that encode polypeptides of the invention (e.g., polypeptides containing amino acid sequences encoded by the polynucleotide sequences delineated in column six, and fragments and variants thereof).

TABLE 2

| | | SEQ | | | | Score/ | | |
|---|---|---|---|---|---|---|---|---|
| Clone ID | Contig | ID | Analysis | | PFam/NR Accession | Percent | | |
| NO:Z | ID: | NO:X | Method | PFam/NR Description | Number | Identity | NT From | NT To |
| HLHBC30 | 910079 | 50 | HMMER | PFAM: C2 domain | PF00168 | 104.78 | 45 | 305 |
| | | | 1.8 | | | | | |
| | | | blastx.14 | 1-phosphatidylinositol- | pir\|S14113\|S14113 | 83% | 9 | 332 |
| | | | | 4,5-bisphosphate | | 74% | 408 | 512 |
| | | | | phosphodiesterase 1 | | 85% | 155 | 175 |
| HLHBD62 | 948847 | 51 | HMMER | PFAM: Fibrillar collagen | PF01410 | 70.4 | 238 | 588 |
| | | | 2.1.1 | C-terminal domain | | | | |
| | | | blastx.14 | fibrillar collagen | gi\|1778210\|gb\|AAC4 | 31% | 250 | 588 |
| | | | | [Arenicola marina] | 7545.1\| | 50% | 7 | 108 |
| | | | | | | 52% | 1 | 108 |
| | | | | | | 48% | 4 | 108 |
| | | | | | | 45% | 4 | 108 |
| | | | | | | 48% | 4 | 108 |
| | | | | | | 50% | 7 | 108 |
| | | | | | | 48% | 4 | 108 |
| | | | | | | 47% | 7 | 108 |
| | | | | | | 45% | 4 | 108 |
| | | | | | | 47% | 1 | 108 |
| | | | | | | 45% | 4 | 108 |
| | | | | | | 45% | 4 | 108 |
| | | | | | | 48% | 7 | 111 |
| | | | | | | 43% | 1 | 111 |
| | | | | | | 50% | 13 | 114 |
| | | | | | | 47% | 1 | 108 |
| | | | | | | 47% | 7 | 108 |
| | | | | | | 48% | 4 | 108 |
| | | | | | | 45% | 4 | 108 |
| | | | | | | 45% | 4 | 108 |
| | | | | | | 42% | 4 | 108 |
| | | | | | | 48% | 4 | 108 |
| | | | | | | 41% | 1 | 108 |
| | | | | | | 43% | 4 | 114 |
| | | | | | | 42% | 4 | 108 |
| | | | | | | 50% | 7 | 108 |
| | | | | | | 44% | 7 | 108 |
| | | | | | | 47% | 7 | 108 |
| | | | | | | 45% | 4 | 108 |
| | | | | | | 50% | 4 | 99 |
| | | | | | | 44% | 7 | 108 |
| | | | | | | 45% | 4 | 108 |
| | | | | | | 42% | 7 | 111 |
| | | | | | | 50% | 7 | 108 |
| | | | | | | 42% | 4 | 108 |
| | | | | | | 45% | 4 | 108 |
| | | | | | | 40% | 4 | 108 |
| | | | | | | 40% | 4 | 108 |
| | | | | | | 44% | 1 | 108 |
| | | | | | | 47% | 7 | 108 |
| | | | | | | 42% | 4 | 108 |
| | | | | | | 44% | 1 | 108 |
| | | | | | | 45% | 7 | 99 |
| | | | | | | 44% | 7 | 108 |
| | | | | | | 47% | 7 | 108 |
| | | | | | | 50% | 7 | 108 |
| | | | | | | 45% | 4 | 108 |
| | | | | | | 42% | 7 | 111 |
| | | | | | | 42% | 7 | 111 |
| | | | | | | 44% | 7 | 108 |
| | | | | | | 44% | 7 | 108 |
| | | | | | | 44% | 7 | 108 |
| | | | | | | 41% | 7 | 108 |
| | | | | | | 40% | 4 | 108 |
| | | | | | | 41% | 4 | 111 |
| | | | | | | 44% | 7 | 108 |
| | | | | | | 45% | 4 | 108 |
| | | | | | | 42% | 4 | 108 |
| | | | | | | 42% | 4 | 108 |
| | | | | | | 41% | 7 | 114 |
| | | | | | | 44% | 7 | 108 |
| | | | | | | 38% | 4 | 111 |
| | | | | | | 44% | 7 | 108 |
| | | | | | | 41% | 7 | 108 |
| | | | | | | 41% | 7 | 108 |
| | | | | | | 44% | 7 | 108 |
| | | | | | | 44% | 7 | 108 |
| | | | | | | 41% | 7 | 108 |
| | | | | | | 44% | 7 | 108 |
| | | | | | | 40% | 4 | 108 |
| | | | | | | 38% | 1 | 108 |
| | | | | | | 41% | 1 | 108 |
| | | | | | | 44% | 7 | 108 |
| | | | | | | 44% | 7 | 108 |
| | | | | | | 42% | 7 | 111 |
| | | | | | | 39% | 7 | 105 |
| | | | | | | 41% | 7 | 108 |
| | | | | | | 44% | 7 | 108 |
| | | | | | | 41% | 7 | 108 |
| | | | | | | 44% | 7 | 108 |
| | | | | | | 41% | 4 | 111 |
| | | | | | | 41% | 7 | 108 |
| | | | | | | 41% | 7 | 108 |
| | | | | | | 41% | 7 | 108 |
| | | | | | | 41% | 7 | 108 |
| | | | | | | 41% | 7 | 108 |
| | | | | | | 38% | 7 | 108 |
| | | | | | | 40% | 7 | 111 |
| | | | | | | 40% | 7 | 111 |
| | | | | | | 38% | 1 | 108 |
| | | | | | | 41% | 7 | 108 |
| | | | | | | 36% | 4 | 111 |
| | | | | | | 38% | 4 | 111 |
| | | | | | | 38% | 7 | 114 |
| | | | | | | 41% | 7 | 108 |
| | | | | | | 41% | 7 | 108 |
| | | | | | | 41% | 7 | 108 |
| | | | | | | 38% | 7 | 108 |
| | | | | | | 40% | 4 | 108 |
| | | | | | | 41% | 7 | 108 |
| | | | | | | 41% | 7 | 108 |
| | | | | | | 37% | 7 | 111 |
| | | | | | | 38% | 7 | 108 |
| | | | | | | 38% | 7 | 108 |
| | | | | | | 38% | 7 | 108 |
| | | | | | | 37% | 7 | 111 |
| | | | | | | 38% | 7 | 108 |
| | | | | | | 38% | 7 | 108 |
| | | | | | | 38% | 7 | 108 |
| | | | | | | 38% | 7 | 108 |
| | | | | | | 36% | 1 | 108 |
| | | | | | | 36% | 4 | 111 |
| | | | | | | 38% | 7 | 108 |
| | | | | | | 38% | 7 | 108 |
| | | | | | | 36% | 19 | 108 |
| HLHDR39 | 523499 | 86 | HMMER | PFAM: IG | PF00047 | 4.05 | 370 | 420 |
| | | | 1.8 | (immunoglobulin) | | | | |
| | | | | superfamily | | | | |
| HLHSI51 | 526201 | 115 | HMMER | PFAM: IG | PF00047 | 2.16 | 125 | 199 |
| | | | 1.8 | (immunoglobulin) | | | | |
| | | | | superfamily | | | | |
| HLHTC07 | 933057 | 154 | blastx.14 | putative p150 [Homo | gi\|2072964\|gb\|AAC5 | 35% | 228 | 49 |
| | | | | sapiens] | 1271.1\| | | | |
| HLJBD62 | 558975 | 169 | HMMER | PFAM: Prokaryotic | PF00384 | 13.58 | 80 | 133 |
| | | | 1.8 | molybdopterin | | | | |
| | | | | oxidoreductases | | | | |
| HLHDP11 | 967751 | 213 | blastx.14 | unnamed protein product | gi\|4774l93\|emb\|CAB | 41% | 271 | 306 |
| | | | | [unidentified] | 42495.1\| | 36% | 114 | 170 |
| | | | | | | 71% | 320 | 340 |
| | | | | | | 83% | 197 | 214 |
| HLHCT68 | 764745 | 223 | HMMER | PFAM: Fibronectin type | PF00041 | 16.02 | 65 | 136 |
| | | | 1.8 | III domain | | | | |
| HLHCN05 | 932023 | 226 | blastx.14 | (AB021921) polyprotein | gi\|4996596\|dbj\|BAA7 | 35% | 72 | 224 |
| | | | | [Human endogenous | 8549.1\| | | | |
| | | | | retrovirus W] | | 40% | 219 | 329 |
| HLHCB07 | 954272 | 236 | blastx.14 | (AL033377) dJ287G14.3 | gi\|4826464\|emb\|CAB | 83% | 72 | 323 |
| | | | | (PUTATIVE novel | 42900.1\| | | | |
| | | | | protein) [Homo sapiens] | | | | |
| HLHBF23 | 908589 | 237 | blastx.14 | zinc finger protein [Homo | gi\|347906\|gb\|AAC37 | 80% | 70 | 192 |
| | | | | sapiens] | 529.1] | 30% | 374 | 463 |
| HLFBG45 | 716946 | 255 | HMMER | PFAM: RNB-like proteins | PF00773 | 48.4 | 1 | 168 |
| | | | 2.1.1 | | | | | |
| HIPAP03 | 922537 | 269 | blastx.14 | (AF123653) FEZ1 [Homo | gi\|4572464\|gb\|AAD2 | 93% | 3 | 560 |
| | | | | sapiens] | 3834.1\|AF123653_1 | 45% | 486 | 557 |
| HAABL43 | 968966 | 293 | blastx.14 | (AF166262) HAL 3A | gi\|5802225\|gb\|AAD5 | 57% | 321 | 698 |
| | | | | protein [Arabidopsis | 1616.1\|AF166262_1 | 32% | 261 | 353 |
| | | | | thaliana] | | | | |
| HA5BM21 | 909795 | 297 | HMMER | PFAM: HMG (high | PF00505 | 4.93 | 291 | 332 |
| | | | 1.8 | mobility group) box | | | | |
| | | | blastx.14 | phospholipase C-delta1 | gi\|1245472\|gb\|AAA9 | 40% | 285 | 464 |
| | | | | [Cricetulus griseus] | 3481.1\| | 46% | 156 | 290 |

[0068] Table 2 further characterizes certain encoded polypeptides of the invention, by providing the results of comparisons to protein and protein family databases. The first column provides a unique clone identifier, “Clone ID NO:”, corresponding to a cDNA clone disclosed in Table 1A. The second column provides the unique contig indentifier, “Contig ID:” which allows correlation with the information in Table 1A. The third column provides the sequence identifier, “SEQ ID NO:X”, for the contig polynucleotide sequences. The fourth column provides the analysis method by which the homology/identity disclosed in the row was determined. The fifth column provides a description of PFam/NR hits having significant matches identified by each analysis. Column six provides the accession number of the PFam/NR hit disclosed in the fifth column. Column seven, “Score/Percent Identity”, provides a quality score or the percent identity, of the hit disclosed in column five. Comparisons were made between polypeptides encoded by polynucleotides of the invention and a non-redundant protein database (herein referred to as “NR”), or a database of protein families (herein referred to as “PFam”), as described below.

[0069] The NR database, which comprises the NBRF PIR database, the NCBI GenPept database, and the SIB SwissProt and TrEMBL databases, was made non-redundant using the computer program nrdb2 (Warren Gish, Washington University in Saint Louis). Each of the polynucleotides shown in Table 1A, column 3 (e.g., SEQ ID NO:X or the ‘Query’ sequence) was used to search against the NR database. The computer program BLASTX was used to compare a 6-frame translation of the Query sequence to the NR database (for information about the BLASTX algorithm please see Altshul et al., J. Mol. Biol. 215:403-410 (1990), and Gish et al., Nat. Genet. 3:266-272 (1993)). A description of the sequence that is most similar to the Query sequence (the highest scoring ‘Subject’) is shown in column five of Table 2 and the database accession number for that sequence is provided in column six. The highest scoring ‘Subject’ is reported in Table 2 if (a) the estimated probability that the match occurred by chance alone is less than 1.0e-07, and (b) the match was not to a known repetitive element. BLASTX returns alignments of short polypeptide segments of the Query and Subject sequences which share a high degree of similarity; these segments are known as High-Scoring Segment Pairs or HSPs. Table 2 reports the degree of similarity between the Query and the Subject for each HSP as a percent identity in Column 7. The percent identity is determined by dividing the number of exact matches between the two aligned sequences in the HSP, dividing by the number of Query amino acids in the HSP and multiplying by 100. The polynucleotides of SEQ ID NO:X which encode the polypeptide sequence that generates an HSP are delineated by columns 8 and 9 of Table 2.

[0070] The PFam database, PFam version 5.2, (Sonnhammer et al., Nucl. Acids Res., 26:320-322, (1998)) consists of a series of multiple sequence alignments; one alignment for each protein family. Each multiple sequence alignment is converted into a probability model called a Hidden Markov Model, or HMM, that represents the position-specific variation among the sequences that make up the multiple sequence alignment (see, e.g., R. Durbin et al., Biological sequence analysis: probabilistic models of proteins and nucleic acids, Cambridge University Press, 1998 for the theory of HMMs). The program HMMER version 1.8 (Sean Eddy, Washington University in Saint Louis) was used to compare the predicted protein sequence for each Query sequence (SEQ ID NO:Y in Table 1A) to each of the HMMs derived from PFam version 5.2. A HMM derived from PFam version 5.2 was said to be a significant match to a polypeptide of the invention if the score returned by HMMER 1.8 was greater than 0.8 times the HMMER 1.8 score obtained with the most distantly related known member of that protein family. The description of the PFam family which shares a significant match with a polypeptide of the invention is listed in column 5 of Table 2, and the database accession number of the PFam hit is provided in column 6. Column 7 provides the score returned by HMMER version 1.8 for the alignment. Columns 8 and 9 delineate the polynucleotides of SEQ ID NO:X which encode the polypeptide sequence which shows a significant match to a PFam protein family.

[0071] As mentioned, columns 8 and 9 in Table 2, “NT From” and “NT To”, delineate the polynucleotides of “SEQ ID NO:X” that encode a polypeptide having a significant match to the PFam/NR database as disclosed in the fifth column of Table 2. In one embodiment, the invention provides a protein comprising, or alternatively consisting of, a polypeptide encoded by the polynucleotides of SEQ ID NO:X delineated in columns 8 and 9 of Table 2. Also provided are polynucleotides encoding such proteins, and the complementary strand thereto.

[0072] The nucleotide sequence SEQ ID NO:X and the translated SEQ ID NO:Y are sufficiently accurate and otherwise suitable for a variety of uses well known in the art and described further below. For instance, the nucleotide sequences of SEQ ID NO:X are useful for designing nucleic acid hybridization probes that will detect nucleic acid sequences contained in SEQ ID NO:X or the cDNA contained in Clone ID NO:Z. These probes will also hybridize to nucleic acid molecules in biological samples, thereby enabling immediate applications in chromosome mapping, linkage analysis, tissue identification and/or typing, and a variety of forensic and diagnostic methods of the invention. Similarly, polypeptides identified from SEQ ID NO:Y may be used to generate antibodies which bind specifically to these polypeptides, or fragments thereof, and/or to the polypeptides encoded by the cDNA clones identified in, for example, Table 1A.

[0073] Nevertheless, DNA sequences generated by sequencing reactions can contain sequencing errors. The errors exist as misidentified nucleotides, or as insertions or deletions of nucleotides in the generated DNA sequence. The erroneously inserted or deleted nucleotides cause frame shifts in the reading frames of the predicted amino acid sequence. In these cases, the predicted amino acid sequence diverges from the actual amino acid sequence, even though the generated DNA sequence may be greater than 99.9% identical to the actual DNA sequence (for example, one base insertion or deletion in an open reading frame of over 1000 bases).

[0074] Accordingly, for those applications requiring precision in the nucleotide sequence or the amino acid sequence, the present invention provides not only the generated nucleotide sequence identified as SEQ ID NO:X, and a predicted translated amino acid sequence identified as SEQ ID NO:Y, but also a sample of plasmid DNA containing cDNA Clone ID NO:Z (deposited with the ATCC on Oct. 5, 2000, and receiving ATCC designation numbers PTA 2574 and PTA 2575; deposited with the ATCC on Jan. 5, 2001, having the depositor reference numbers TS-1, TS-2, AC-1, and AC-2; and/or as set forth, for example, in Table 1A, 6 and 7). The nucleotide sequence of each deposited clone can readily be determined by sequencing the deposited clone in accordance with known methods. Further, techniques known in the art can be used to verify the nucleotide sequences of SEQ ID NO:X.

[0075] The predicted amino acid sequence can then be verified from such deposits. Moreover, the amino acid sequence of the protein encoded by a particular clone can also be directly determined by peptide sequencing or by expressing the protein in a suitable host cell containing the deposited human cDNA, collecting the protein, and determining its sequence.

[0076] RACE Protocol For Recovery of Full-Length Genes

[0077] Partial cDNA clones can be made full-length by utilizing the rapid amplification of cDNA ends (RACE) procedure described in Frohman, M. A., et al., Proc. Nat'l. Acad. Sci. USA, 85:8998-9002 (1988). A cDNA clone missing either the 5′ or 3′ end can be reconstructed to include the absent base pairs extending to the translational start or stop codon, respectively. In some cases, cDNAs are missing the start codon of translation. The following briefly describes a modification of this original 5′ RACE procedure. Poly A+ or total RNA is reverse transcribed with Superscript II (Gibco/BRL) and an antisense or complementary primer specific to the cDNA sequence. The primer is removed from the reaction with a Microcon Concentrator (Amicon). The first-strand cDNA is then tailed with dATP and terminal deoxynucleotide transferase (Gibco/BRL). Thus, an anchor sequence is produced which is needed for PCR amplification. The second strand is synthesized from the dA-tail in PCR buffer, Taq DNA polymerase (Perkin-Elmer Cetus), an oligo-dT primer containing three adjacent restriction sites (XhoI, SalI and ClaI) at the 5′ end and a primer containing just these restriction sites. This double-stranded cDNA is PCR amplified for 40 cycles with the same primers as well as a nested cDNA-specific antisense primer. The PCR products are size-separated on an ethidium bromide-agarose gel and the region of gel containing cDNA products the predicted size of missing protein-coding DNA is removed. cDNA is purified from the agarose with the Magic PCR Prep kit (Promega), restriction digested with XhoI or SalI, and ligated to a plasmid such as pBluescript SKII (Stratagene) at XhoI and EcoRV sites. This DNA is transformed into bacteria and the plasmid clones sequenced to identify the correct protein-coding inserts. Correct 5′ ends are confirmed by comparing this sequence with the putatively identified homologue and overlap with the partial cDNA clone. Similar methods known in the art and/or commercial kits are used to amplify and recover 3′ ends.

[0078] Several quality-controlled kits are commercially available for purchase. Similar reagents and methods to those above are supplied in kit form from Gibco/BRL for both 5′ and 3′ RACE for recovery of full length genes. A second kit is available from Clontech which is a modification of a related technique, SLIC (single-stranded ligation to single-stranded cDNA), developed by Dumas et al., Nucleic Acids Res., 19:5227-32 (1991). The major differences in procedure are that the RNA is alkaline hydrolyzed after reverse transcription and RNA ligase is used to join a restriction site-containing anchor primer to the first-strand cDNA. This obviates the necessity for the dA-tailing reaction which results in a polyT stretch that is difficult to sequence past.

[0079] An alternative to generating 5′ or 3′ cDNA from RNA is to use cDNA library double-stranded DNA. An asymmetric PCR-amplified antisense cDNA strand is synthesized with an antisense cDNA-specific primer and a plasmid-anchored primer. These primers are removed and a symmetric PCR reaction is performed with a nested cDNA-specific antisense primer and the plasmid-anchored primer.

[0080] RNA Ligase Protocol For Generating the 5′ or 3′ End Sequences To Obtain Full Length Genes

[0081] Once a gene of interest is identified, several methods are available for the identification of the 5′ or 3′ portions of the gene which may not be present in the original cDNA plasmid. These methods include, but are not limited to, filter probing, clone enrichment using specific probes and protocols similar and identical to 5′ and 3′ RACE. While the full length gene may be present in the library and can be identified by probing, a useful method for generating the 5′ or 3′ end is to use the existing sequence information from the original cDNA to generate the missing information. A method similar to 5′ RACE is available for generating the missing 5′ end of a desired full-length gene. (This method was published by Fromont-Racine et al., Nucleic Acids Res., 21(7):1683-1684 (1993)). Briefly, a specific RNA oligonucleotide is ligated to the 5′ ends of a population of RNA presumably containing full-length gene RNA transcript. A primer set containing a primer specific to the ligated RNA oligonucleotide and a primer specific to a known sequence of the gene of interest, is used to PCR amplify the 5′ portion of the desired full length gene which may then be sequenced and used to generate the full length gene. This method starts with total RNA isolated from the desired source, poly A RNA may be used but is not a prerequisite for this procedure. The RNA preparation may then be treated with phosphatase if necessary to eliminate 5′ phosphate groups on degraded or damaged RNA, which may interfere with the later RNA ligase step. The phosphatase, if used, is then inactivated and the RNA is treated with tobacco acid pyrophosphatase in order to remove the cap structure present at the 5′ ends of messenger RNAs. This reaction leaves a 5′ phosphate group at the 5′ end of the cap cleaved RNA which can then be ligated to an RNA oligonucleotide using T4 RNA ligase. This modified RNA preparation can then be used as a template for first strand cDNA synthesis using a gene specific oligonucleotide. The first strand synthesis reaction can then be used as a template for PCR amplification of the desired 5′ end using a primer specific to the ligated RNA oligonucleotide and a primer specific to the known sequence of the respiratory system antigen of interest. The resultant product is then sequenced and analyzed to confirm that the 5′ end sequence belongs to the relevant respiratory system antigen.

[0082] The present invention also relates to vectors or plasmids, which include such DNA sequences, as well as the use of the DNA sequences. The material deposited with the ATCC (deposited with the ATCC on Oct. 5, 2000, and receiving ATCC designation numbers PTA 2574 and PTA 2575; deposited with the ATCC on Jan. 5, 2001, having the depositor reference numbers TS-1, TS-2, AC-1, and AC-2; and/or as set forth, for example, in Table 1A, 6 and 7) is a mixture of cDNA clones derived from a variety of human tissue and cloned in either a plasmid vector or a phage vector, as shown, for example, in Table 7. These deposits are referred to as “the deposits” herein. The tissues from which some of the clones were derived are listed in Table 7, and the vector in which the corresponding cDNA is contained is also indicated in Table 7. The deposited material includes cDNA clones corresponding to SEQ ID NO:X described, for example, in Table 1A (Clone ID NO:Z). A clone which is isolatable from the ATCC Deposits by use of a sequence listed as SEQ ID NO:X, may include the entire coding region of a human gene or in other cases such clone may include a substantial portion of the coding region of a human gene. Furthermore, although the sequence listing may in some instances list only a portion of the DNA sequence in a clone included in the ATCC Deposits, it is well within the ability of one skilled in the art to sequence the DNA included in a clone contained in the ATCC Deposits by use of a sequence (or portion thereof) described in, for example Tables 1A or 2 by procedures hereinafter further described, and others apparent to those skilled in the art.

[0083] Also provided in Table 7 is the name of the vector which contains the cDNA clone. Each vector is routinely used in the art. The following additional information is provided for convenience.

[0084] Vectors Lambda Zap (U.S. Pat. Nos. 5,128,256 and 5,286,636), Uni-Zap XR (U.S. Pat. Nos. 5,128,256 and 5,286,636), Zap Express (U.S. Pat. Nos. 5,128,256 and 5,286,636), pBluescript (pBS) (Short, J. M. et al., Nucleic Acids Res. 16:7583-7600 (1988); Alting-Mees, M. A. and Short, J. M., Nucleic Acids Res. 17:9494 (1989)) and pBK (Alting-Mees, M. A. et al., Strategies 5:58-61 (1992)) are commercially available from Stratagene Cloning Systems, Inc., 11011 N. Torrey Pines Road, La Jolla, Calif., 92037. pBS contains an ampicillin resistance gene and pBK contains a neomycin resistance gene. Phagemid pBS may be excised from the Lambda Zap and Uni-Zap XR vectors, and phagemid pBK may be excised from the Zap Express vector. Both phagemids may be transformed into E. coli strain XL-1 Blue, also available from Stratagene.

[0085] Vectors pSport1, pCMVSport 1.0, pCMVSport 2.0 and pCMVSport 3.0, were obtained from Life Technologies, Inc., P. O. Box 6009, Gaithersburg, Md. 20897. All Sport vectors contain an ampicillin resistance gene and may be transformed into E. coli strain DH10B, also available from Life Technologies. See, for instance, Gruber, C. E., et al., Focus 15:59- (1993). Vector lafmid BA (Bento Soares, Columbia University, New York, N.Y.) contains an ampicillin resistance gene and can be transformed into E. coli strain XL-1 Blue. Vector pCR® 2.1, which is available from Invitrogen, 1600 Faraday Avenue, Carlsbad, Calif. 92008, contains an ampicillin resistance gene and may be transformed into E. coli strain DH10B, available from Life Technologies. See, for instance, Clark, J. M., Nuc. Acids Res. 16:9677-9686 (1988) and Mead, D. et al., Bio/Technology 9: (1991).

[0086] The present invention also relates to the genes corresponding to SEQ ID NO:X, SEQ ID NO:Y, and/or the deposited clone (Clone ID NO:Z). The corresponding gene can be isolated in accordance with known methods using the sequence information disclosed herein. Such methods include preparing probes or primers from the disclosed sequence and identifying or amplifying the corresponding gene from appropriate sources of genomic material.

[0087] Also provided in the present invention are allelic variants, orthologs, and/or species homologs. Procedures known in the art can be used to obtain full-length genes, allelic variants, splice variants, full-length coding portions, orthologs, and/or species homologs of respiratory system associated genes corresponding to SEQ ID NO:X or the complement thereof, polypeptides encoded by SEQ ID NO:X or the complement thereof, and/or the cDNA contained in Clone ID NO:Z, using information from the sequences disclosed herein or the clones deposited with the ATCC. For example, allelic variants and/or species homologs may be isolated and identified by making suitable probes or primers from the sequences provided herein and screening a suitable nucleic acid source for allelic variants and/or the desired homologue.

[0088] The polypeptides of the invention can be prepared in any suitable manner. Such polypeptides include isolated naturally occurring polypeptides, recombinantly produced polypeptides, synthetically produced polypeptides, or polypeptides produced by a combination of these methods. Means for preparing such polypeptides are well understood in the art.

[0089] The polypeptides may be in the form of the secreted protein, including the mature form, or may be a part of a larger protein, such as a fusion protein (see below). It is often advantageous to include an additional amino acid sequence which contains secretory or leader sequences, pro-sequences, sequences which aid in purification, such as multiple histidine residues, or an additional sequence for stability during recombinant production.

[0090] The polypeptides of the present invention are preferably provided in an isolated form, and preferably are substantially purified. A recombinantly produced version of a polypeptide, including the secreted polypeptide, can be substantially purified using techniques described herein or otherwise known in the art, such as, for example, by the one-step method described in Smith and Johnson, Gene 67:31-40 (1988). Polypeptides of the invention also can be purified from natural, synthetic or recombinant sources using techniques described herein or otherwise known in the art, such as, for example, antibodies of the invention raised against the respiratory system polypeptides of the present invention in methods which are well known in the art.

[0091] The present invention provides a polynucleotide comprising, or alternatively consisting of, the nucleic acid sequence of SEQ ID NO:X, and/or the cDNA sequence contained in Clone ID NO:Z. The present invention also provides a polypeptide comprising, or alternatively, consisting of, the polypeptide sequence of SEQ ID NO:Y, a polypeptide encoded by SEQ ID NO:X or a complement thereof, a polypeptide encoded by the cDNA contained in Clone ID NO:Z, and/or the polypeptide sequence encoded by a nucleotide sequence in SEQ ID NO:B as defined in column 6 of Table 1B. Polynucleotides encoding a polypeptide comprising, or alternatively consisting of the polypeptide sequence of SEQ ID NO:Y, a polypeptide encoded by SEQ ID NO:X, a polypeptide encoded by the cDNA contained in Clone ID NO:Z and/or a polypeptide sequence encoded by a nucleotide sequence in SEQ ID NO:B as defined in column 6 of Table 1B are also encompassed by the invention. The present invention further encompasses a polynucleotide comprising, or alternatively consisting of, the complement of the nucleic acid sequence of SEQ ID NO:X, a nucleic acid sequence encoding a polypeptide encoded by the complement of the nucleic acid sequence of SEQ ID NO:X, and/or the cDNA contained in Clone ID NO:Z.

[0092] Moreover, representative examples of polynucleotides of the invention comprise, or alternatively consist of, one, two, three, four, five, six, seven, eight, nine, ten, or more of the sequences delineated in Table 1B column 6, or any combination thereof. Additional, representative examples of polynucleotides of the invention comprise, or alternatively consist of, one, two, three, four, five, six, seven, eight, nine, ten, or more of the complementary strand(s) of the sequences delineated in Table 1B column 6, or any combination thereof. In further embodiments, the above-described polynucleotides of the invention comprise, or alternatively consist of, sequences delineated in Table 1B, column 6, and have a nucleic acid sequence which is different from that of the BAC fragment having the sequence disclosed in SEQ ID NO:B (see Table 1B, column 5). In additional embodiments, the above-described polynucleotides of the invention comprise, or alternatively consist of, sequences delineated in Table 1B, column 6, and have a nucleic acid sequence which is different from that published for the BAC clone identified as BAC ID NO:A (see Table 1B, column 4). In additional embodiments, the above-described polynucleotides of the invention comprise, or alternatively consist of, sequences delineated in Table 1B, column 6, and have a nucleic acid sequence which is different from that contained in the BAC clone identified as BAC ID NO:A (see Table 1B, column 4). Polypeptides encoded by these polynucleotides, other polynucleotides that encode these polypeptides, and antibodies that bind these polypeptides are also encompassed by the invention. Additionally, fragments and variants of the above-described polynucleotides and polypeptides are also encompassed by the invention.

[0093] Further, representative examples of polynucleotides of the invention comprise, or alternatively consist of, one, two, three, four, five, six, seven, eight, nine, ten, or more of the sequences delineated in column 6 of Table 1B which correspond to the same Clone ID NO:Z (see Table 1B, column 1), or any combination thereof. Additional, representative examples of polynucleotides of the invention comprise, or alternatively consist of, one, two, three, four, five, six, seven, eight, nine, ten, or more of the complementary strand(s) of the sequences delineated in column 6 of Table 1B which correspond to the same Clone ID NO:Z (see Table 1B, column 1), or any combination thereof. In further embodiments, the above-described polynucleotides of the invention comprise, or alternatively consist of, sequences delineated in column 6 of Table 1B which correspond to the same Clone ID NO:Z (see Table 1B, column 1) and have a nucleic acid sequence which is different from that of the BAC fragment having the sequence disclosed in SEQ ID NO:B (see Table 1B, column 5). In additional embodiments, the above-described polynucleotides of the invention comprise, or alternatively consist of, sequences delineated in column 6 of Table 1B which correspond to the same Clone ID NO:Z (see Table 1B, column 1) and have a nucleic acid sequence which is different from that published for the BAC clone identified as BAC ID NO:A (see Table 1B, column 4). In additional embodiments, the above-described polynucleotides of the invention comprise, or alternatively consist of, sequences delineated in column 6 of Table 1B which correspond to the same Clone ID NO:Z (see Table 1B, column 1) and have a nucleic acid sequence which is different from that contained in the BAC clone identified as BAC ID NO:A (see Table 1B, column 4). Polypeptides encoded by these polynucleotides, other polynucleotides that encode these polypeptides, and antibodies that bind these polypeptides are also encompassed by the invention. Additionally, fragments and variants of the above-described polynucleotides and polypeptides are also encompassed by the invention.

[0094] Further, representative examples of polynucleotides of the invention comprise, or alternatively consist of, one, two, three, four, five, six, seven, eight, nine, ten, or more of the sequences delineated in column 6 of Table 1B which correspond to the same contig sequence identifer SEQ ID NO:X (see Table 1B, column 2), or any combination thereof. Additional, representative examples of polynucleotides of the invention comprise, or alternatively consist of, one, two, three, four, five, six, seven, eight, nine, ten, or more of the complementary strand(s) of the sequences delineated in column 6 of Table 1B which correspond to the same contig sequence identifer SEQ ID NO:X (see Table 1B, column 2), or any combination thereof. In further embodiments, the above-described polynucleotides of the invention comprise, or alternatively consist of, sequences delineated in column 6 of Table 1B which correspond to the same contig sequence identifer SEQ ID NO:X (see Table 1B, column 2) and have a nucleic acid sequence which is different from that of the BAC fragment having the sequence disclosed in SEQ ID NO:B (see Table 1B, column 5). In additional embodiments, the above-described polynucleotides of the invention comprise, or alternatively consist of, sequences delineated in column 6 of Table 1B which correspond to the same contig sequence identifer SEQ ID NO:X (see Table 1B, column 2) and have a nucleic acid sequence which is different from that published for the BAC clone identified as BAC ID NO:A (see Table 1B, column 4). In additional embodiments, the above-described polynucleotides of the invention comprise, or alternatively consist of, sequences delineated in column 6 of Table 1B which correspond to the same contig sequence identifer SEQ ID NO:X (see Table 1B, column 2) and have a nucleic acid sequence which is different from that contained in the BAC clone identified as BAC ID NO:A (See Table 1B, column 4). Polypeptides encoded by these polynucleotides, other polynucleotides that encode these polypeptides, and antibodies that bind these polypeptides are also encompassed by the invention. Additionally, fragments and variants of the above-described polynucleotides and polypeptides are also encompassed by the invention.

[0095] Moreover, representative examples of polynucleotides of the invention comprise, or alternatively consist of, one, two, three, four, five, six, seven, eight, nine, ten, or more of the sequences delineated in the same row of Table 1B column 6, or any combination thereof. Additional, representative examples of polynucleotides of the invention comprise, or alternatively consist of, one, two, three, four, five, six, seven, eight, nine, ten, or more of the complementary strand(s) of the sequences delineated in the same row of Table 1B column 6, or any combination thereof. In preferred embodiments, the polynucleotides of the invention comprise, or alternatively consist of, one, two, three, four, five, six, seven, eight, nine, ten, or more of the complementary strand(s) of the sequences delineated in the same row of Table 1B column 6, wherein sequentially delineated sequences in the table (i.e. corresponding to those exons located closest to each other) are directly contiguous in a 5′ to 3′ orientation. In further embodiments, above-described polynucleotides of the invention comprise, or alternatively consist of, sequences delineated in the same row of Table 1B, column 6, and have a nucleic acid sequence which is different from that of the BAC fragment having the sequence disclosed in SEQ ID NO:B (see Table 1B, column 5). In additional embodiments, the above-described polynucleotides of the invention comprise, or alternatively consist of, sequences delineated in the same row of Table 1B, column 6, and have a nucleic acid sequence which is different from that published for the BAC clone identified as BAC ID NO:A (see Table 1B, column 4). In additional embodiments, the above-described polynucleotides of the invention comprise, or alternatively consist of, sequences delineated in the same row of Table 1B, column 6, and have a nucleic acid sequence which is different from that contained in the BAC clone identified as BAC ID NO:A (see Table 1B, column 4). Polypeptides encoded by these polynucleotides, other polynucleotides that encode these polypeptides, and antibodies that bind these polypeptides are also encompassed by the invention.

[0096] In additional specific embodiments, polynucleotides of the invention comprise, or alternatively consist of, one, two, three, four, five, six, seven, eight, nine, ten, or more of the sequences delineated in column 6 of Table 1B, and the polynucleotide sequence of SEQ ID NO:X (e.g., as defined in Table 1B, column 2) or fragments or variants thereof. Polypeptides encoded by these polynucleotides, other polynucleotides that encode these polypeptides, and antibodies that bind these polypeptides are also encompassed by the invention.

[0097] In additional specific embodiments, polynucleotides of the invention comprise, or alternatively consist of, one, two, three, four, five, six, seven, eight, nine, ten, or more of the sequences delineated in column 6 of Table 1B which correspond to the same Clone ID NO:Z (see Table 1B, column 1), and the polynucleotide sequence of SEQ ID NO:X (e.g., as defined in Table 1A or 1B) or fragments or variants thereof. In preferred embodiments, the delineated sequence(s) and polynucleotide sequence of SEQ ID NO:X correspond to the same Clone ID NO:Z. Polypeptides encoded by these polynucleotides, other polynucleotides that encode these polypeptides, and antibodies that bind these polypeptides are also encompassed by the invention.

[0098] In further specific embodiments, polynucleotides of the invention comprise, or alternatively consist of, one, two, three, four, five, six, seven, eight, nine, ten, or more of the sequences delineated in the same row of column 6 of Table 1B, and the polynucleotide sequence of SEQ ID NO:X (e.g., as defined in Table 1A or 1B) or fragments or variants thereof. In preferred embodiments, the delineated sequence(s) and polynucleotide sequence of SEQ ID NO:X correspond to the same row of column 6 of Table 1B. Polypeptides encoded by these polynucleotides, other polynucleotides that encode these polypeptides, and antibodies that bind these polypeptides are also encompassed by the invention.

[0099] In additional specific embodiments, polynucleotides of the invention comprise, or alternatively consist of a polynucleotide sequence in which the 3′ 10 polynucleotides of one of the sequences delineated in column 6 of Table 1B and the 5′ 10 polynucleotides of the sequence of SEQ ID NO:X are directly contiguous. Nucleic acids which hybridize to the complement of these 20 contiguous polynucleotides under stringent hybridization conditions or alternatively, under lower stringency conditions, are also encompassed by the invention. Polypeptides encoded by these polynucleotides and/or nucleic acids, other polynucleotides and/or nucleic acids that encode these polypeptides, and antibodies that bind these polypeptides are also encompassed by the invention. Additionally, fragments and variants of the above-described polynucleotides, nucleic acids, and polypeptides are also encompassed by the invention.

[0100] In additional specific embodiments, polynucleotides of the invention comprise, or alternatively consist of, a polynucleotide sequence in which the 3′ 10 polynucleotides of one of the sequences delineated in column 6 of Table 1B and the 5′ 10 polynucleotides of a fragment or variant of the sequence of SEQ ID NO:X are directly contiguous Nucleic acids which hybridize to the complement of these 20 contiguous polynucleotides under stringent hybridization conditions or alternatively, under lower stringency conditions, are also encompassed by the invention. Polypeptides encoded by these polynucleotides and/or nucleic acids, other polynucleotides and/or nucleic acids encoding these polypeptides, and antibodies that bind these polypeptides are also encompassed by the invention. Additionally, fragments and variants of the above-described polynucleotides, nucleic acids, and polypeptides are also encompassed by the invention.

[0101] In specific embodiments, polynucleotides of the invention comprise, or alternatively consist of, a polynucleotide sequence in which the 3′ 10 polynucleotides of the sequence of SEQ ID NO:X and the 5′ 10 polynucleotides of the sequence of one of the sequences delineated in column 6 of Table 1B are directly contiguous. Nucleic acids which hybridize to the complement of these 20 contiguous polynucleotides under stringent hybridization conditions or alternatively, under lower stringency conditions, are also encompassed by the invention. Polypeptides encoded by these polynucleotides and/or nucleic acids, other polynucleotides and/or nucleic acids encoding these polypeptides, and antibodies that bind these polypeptides are also encompassed by the invention. Additionally, fragments and variants of the above-described polynucleotides, nucleic acids, and polypeptides are also encompassed by the invention.

[0102] In specific embodiments, polynucleotides of the invention comprise, or alternatively consist of, a polynucleotide sequence in which the 3′ 10 polynucleotides of a fragment or variant of the sequence of SEQ ID NO:X and the 5′ 10 polynucleotides of the sequence of one of the sequences delineated in column 6 of Table 1B are directly contiguous. Nucleic acids which hybridize to the complement of these 20 contiguous polynucleotides under stringent hybridization conditions or alternatively, under lower stringency conditions, are also encompassed by the invention. Polypeptides encoded by these polynucleotides and/or nucleic acids, other polynucleotides and/or nucleic acids encoding these polypeptides, and antibodies that bind these polypeptides are also encompassed by the invention. Additionally, fragments and variants of the above-described polynucleotides, nucleic acids, and polypeptides, are also encompassed by the invention.

[0103] In further specific embodiments, polynucleotides of the invention comprise, or alternatively consist of, a polynucleotide sequence in which the 3′ 10 polynucleotides of one of the sequences delineated in column 6 of Table 1B and the 5′ 10 polynucleotides of another sequence in column 6 are directly contiguous. Nucleic acids which hybridize to the complement of these 20 contiguous polynucleotides under stringent hybridization conditions or alternatively, under lower stringency conditions, are also encompassed by the invention. Polypeptides encoded by these polynucleotides and/or nucleic acids, other polynucleotides and/or nucleic acids encoding these polypeptides, and antibodies that bind these polypeptides are also encompassed by the invention. Additionally, fragments and variants of the above-described polynucleotides, nucleic acids, and polypeptides are also encompassed by the invention.

[0104] In specific embodiments, polynucleotides of the invention comprise, or alternatively consist of, a polynucleotide sequence in which the 3′ 10 polynucleotides of one of the sequences delineated in column 6 of Table 1B and the 5′ 10 polynucleotides of another sequence in column 6 corresponding to the same Clone ID NO:Z (see Table 1B, column 1) are directly contiguous. Nucleic acids which hybridize to the complement of these 20 lower stringency conditions, are also encompassed by the invention. Polypeptides encoded by these polynucleotides and/or nucleic acids, other polynucleotides and/or nucleic acids encoding these polypeptides, and antibodies that bind these polypeptides are also encompassed by the invention. Additionally, fragments and variants of the above-described polynucleotides, nucleic acids, and polypeptides are also encompassed by the invention.

[0105] In specific embodiments, polynucleotides of the invention comprise, or alternatively consist of, a polynucleotide sequence in which the 3′ 10 polynucleotides of one sequence in column 6 corresponding to the same contig sequence identifer SEQ ID NO:X (see Table 1B, column 2) are directly contiguous. Nucleic acids which hybridize to the complement of these 20 contiguous polynucleotides under stringent hybridization conditions or alternatively, under lower stringency conditions, are also encompassed by the invention. Polypeptides encoded by these polynucleotides and/or nucleic acids, other polynucleotides and/or nucleic acids encoding these polypeptides, and antibodies that bind these polypeptides are also encompassed by the invention. Additionally, fragments and variants of the above-described polynucleotides, nucleic acids, and polypeptides are also encompassed by the invention.

[0106] In specific embodiments, polynucleotides of the invention comprise, or alternatively consist of a polynucleotide sequence in which the 3′ 10 polynucleotides of one of the sequences delineated in column 6 of Table 1B and the 5′ 10 polynucleotides of another sequence in column 6 corresponding to the same row are directly contiguous. In preferred embodiments, the 3′ 10 polynucleotides of one of the sequences delineated in column 6 of Table 1B is directly contiguous with the 5′ 10 polynucleotides of the next sequential exon delineated in Table 1B, column 6. Nucleic acids which hybridize to the complement of these 20 contiguous polynucleotides under stringent hybridization conditions or alternatively, under lower stringency conditions, are also encompassed by the invention. Polypeptides encoded by these polynucleotides and/or nucleic acids, other polynucleotides and/or nucleic acids encoding these polypeptides, and antibodies that bind these polypeptides are also encompassed by the invention. Additionally, fragments and variants of the above-described polynucleotides, nucleic acids, and polypeptides are also encompassed by the invention.

[0107] Many polynucleotide sequences, such as EST sequences, are publicly available and accessible through sequence databases and may have been publicly available prior to conception of the present invention. Preferably, such related polynucleotides are specifically excluded from the scope of the present invention. Accordingly, for each contig sequence (SEQ ID NO:X) listed in the third column of Table 1A, preferably excluded are one or more polynucleotides comprising a nucleotide sequence described by the general formula of a-b, where a is any integer between 1 and the final nucleotide minus 15 of SEQ ID NO:X, b is an integer of 15 to the final nucleotide of SEQ ID NO:X, where both a and b correspond to the positions of nucleotide residues shown in SEQ ID NO:X, and where b is greater than or equal to a+14. More specifically, preferably excluded are one or more polynucleotides comprising a nucleotide sequence described by the general formula of a-b, where a and b are integers as defined in columns 4 and 5, respectively, of Table 3. In specific embodiments, the polynucleotides of the invention do not consist of at least one, two, three, four, five, ten, or more of the specific polynucleotide sequences referenced by the Genbank Accession No. as disclosed in column 6 of Table 3 (including for example, published sequence in connection with a particular BAC clone). In further embodiments, preferably excluded from the invention are the specific polynucleotide sequence(s) contained in the clones corresponding to at least one, two, three, four, five, ten, or more of the available material having the accession numbers identified in the sixth column of this Table (including for example, the actual sequence contained in an identified BAC clone). In no way is this listing meant to encompass all of the sequences which may be excluded by the general formula, it is just a representative example. All references available through these accessions are hereby incorporated by reference in their entirety.

TABLE 3

| | SEQ | | | | |
|---|---|---|---|---|---|
| | ID | | EST Disclaimer | | |
| Clone ID | NO: | Contig | Range | Range | |
| NO: Z | X | ID: | of a | of b | Accession #'s |
| HAAXD06 | 11 | 933590 | 1-75 | 15-89 | |
| HBHMA28 | 12 | 848071 | 1-471 | 15-485 | |
| HBHMB50 | 13 | 724019 | 1-317 | 15-331 | |
| HBHME61 | 14 | 741527 | 1-470 | 15-484 | |
| HCLCRO9 | 15 | 963688 | 1-605 | 15-619 | AF207550. |
| HCLCWS4 | 16 | 729100 | 1-387 | 15-401 | AL008629, Z69923, AC007161, AC004614, Z80771, AL031177, Z98043, AC007423, AC005181, |
| | | | | | AL049844, Z95124, AL122023, AL034369, AC003976, AC006971, AJ006997, AC004526, AC004222, |
| | | | | | AC002449, AL133233, Z84720, AL049767, AL034407, AJ006995, Z95331, AL008713, AC004544, |
| | | | | | AC010349, AF227510, AJ009632, AC008173, AC007372, AL049837, AL136520, AC006052, |
| | | | | | AL049911, Z82210, AL132668, AL022154, AL035534, AP000078, AC007157, AC004225, AC004968, |
| | | | | | Z75741, AC007380, AC004045, and AC005261. |
| HCLSB28 | 17 | 500815 | 1-245 | 15-259 | AA326934, AA326933, AA259012, and A1125852. |
| HCLSB53 | 18 | 612042 | 1-300 | 15-314 | AA326977, and AA326775. |
| HCLSC85 | 19 | 973802 | 1-421 | 15-435 | A1590485, AW303008, A1349849, A1797998, AI446464, AI628219, AA177061, C06329, AI923052, |
| | | | | | AA169245, AA600132, A1017251, AW169038, AW162288, F13749, A1753488, AA916430, AI141130, |
| | | | | | AW021583, AW338035, AW338021, AL079595, AA720732, AI040051, AW068580, A1537694, |
| | | | | | AI279417, H53217, F32171, AW410354, AI457597, AW068596, AI929410, AA469245, AA484892, |
| | | | | | AA679946, AA629540, AA666332, AW007980, C06046, AA832145, AI064864, AI310670, AI634187, |
| | | | | | R92658, A1696793, AA829565, AA523695, AA838140, AA482953, AL041706, AI612070, AL047349, |
| | | | | | AI349130, AA947369, AW327624, AL039930, AI473921, AA704393, AI061320, AI754037, |
| | | | | | AW084445, H78898, AW265009, AC005670, AC005261, AC006023, AC004790, AL117337, |
| | | | | | AC000353, AC004583, AC007283, AC005399, AL049775, AC004813, AF205588, AC005696, |
| | | | | | AC007731, AL109628, AC005500, AL024507, AC002527, AL136295, AL049829, AC005274, |
| | | | | | AL035071, AL133246, AP000355, AC005015, AC004253, U91319, AL050350, AC005207, AF196779, |
| | | | | | AL031602, AC007664, AC007051, AC005200, AP000269, Z82206, AC002470, AP000151, AC006960, |
| | | | | | AL135960, AJ131016, AC005064, AP000103, AP000555, AF196972, AL049780, AC007011, |
| | | | | | AL031311, AC006966, AC005081, AL031000, AC005881, AB003151, U95743, Z85986, AP000557, |
| | | | | | Z98304, Z82201, AC016830, AF002223, AL049643, AC006088, AC004466, AP000511, AC012627, |
| | | | | | U82828, AC007546, AL132777, AC006026, AL033521, U78027, AC005409, AL035079, AL050333, |
| | | | | | AL133448, AC004019, AC004181, AC016025, AC003029, AC005049, AC002480, AC002477, |
| | | | | | AL035422, AC003676, AC004106, AC004099, AC006354, AC005703, AC007308, AC001226, |
| | | | | | AC005878, Z98946, AL122020, AC006241, AL022721, Z94056, AL117351, AC002996, Z99570, |
| | | | | | U85195, AC005089, AF165926, Z83844, AC006210, AC005971, AC010205, AF003529, AL096817, |
| | | | | | AC005284, AC006120, AP000010, AL049766, AC004228, AF187320, AL022316, AE000658, |
| | | | | | AC006530, Y14768, AC002302, AL049839, AC002365, AL049776, AC004765, AL109799, AF111168, |
| | | | | | Z95114, AP000114, AP000046, AC004890, AP000505, AC007536, AL020995, AC005220, Al109758, |
| | | | | | AC006468, AC004491, AC004526, AC007227, Z86090, AC004129, AL049779, AL049589, AL035089, |
| | | | | | AC006312, AC008018, AP000117, AF196971, AC005829, AC004024, AC005245, AC005531, |
| | | | | | AC008072, AC002310, AF196969, AC005875, AC005165, AC007685, AC002472, AC005899, |
| | | | | | AF181897, AL049757, AR036572, U91328, AL078477, AC004027, AC005317, Z82215, AC002369, |
| | | | | | AC009498, AC005632, AL133163, U80460, AC004217, Z94721, AC009516, AC005082, AC002990, |
| | | | | | L47334, AL031594, AL031985, AC005209, AC004475, AL109839, AP000116, Z98036, U95742, |
| | | | | | AC005017, Z98751, AC009247, AC000003, AP000688, AC005358, Z93016, AL031681, AC005823, |
| | | | | | AC005940, AP000502, AC004531, AC005183, L78833, AC007216, U93305, AC004673, AC007406, |
| | | | | | AB023049, AC007055, AC004230, AC004408, AL049634, AC008055, AC007919, AF139813, |
| | | | | | AC005251, AC005037, AL022336, AL034429, AC007785, AC003664, AL022163, AP000193, |
| | | | | | AL035455, AC008064, AP000552, AC006512, U63721, AC008009, AL078623, AL022165, AC007637, |
| | | | | | AC005529, AB023048, AL121825, AC004448, AL078638, AC004933, AC002997, AC005921, |
| | | | | | AC007199, AL049843, AP000008, AP000694, AC004477, and AC007225. |
| HLAAA43 | 20 | 714473 | 1-152 | 15-166 | AF051321. |
| HLFBE35 | 21 | 707221 | 1-344 | 15-358 | AA358322, and AA358143. |
| HLFBE48 | 22 | 722012 | 1-217 | 15-231 | AA358155, AA358336, and AC005884. |
| HLFBH73 | 23 | 722010 | 1-373 | 15-387 | AA358335, AA358154, AF150260, AA858372, AW410784, R64640, AA532744, AA166931, |
| | | | | | AC005884, AL022330, AC004032, AC007537, AP000503, AF134726, Z95116, X69953, D14034, |
| | | | | | AL023879, AF196969, AC005095, AC004967, AL022317, Al031311, AL031848, AL109623, |
| | | | | | AL023553, AC006974, AC004522, AL024507, AL080243, U85195, AL024498, AC005944, U95743, |
| | | | | | AC005369, AL133382, Z98946, AE000658, Z99754, AL031577, AP000696, AP000240, AC005211, |
| | | | | | AC005736, AC005356, AC005619, AC005102, AL031657, AL109837, and Z99495. |
| HLHAB43 | 24 | 714350 | 1-383 | 15-397 | AA358766, and C16965. |
| HLHAB50 | 25 | 932849 | 1-301 | 15-315 | AA358791, and AC006461. |
| HLHAC22 | 26 | 766850 | 1-371 | 15-385 | AA358831, AA205032, A1806796, AA909749, AA740715, AA356521, AI720241, AA687336, |
| | | | | | AI803338, AI248115, AA728749, AA205681, and AF126736. |
| HLHAC31 | 27 | 503549 | 1-303 | 15-317 | AA358835, AA359910, Z98941, AC001231, AC005488, and AC005277. |
| HLHAD75 | 28 | 503274 | 1-227 | 15-241 | AA358920, and AJ251973. |
| HLHAD82 | 29 | 503280 | 1-313 | 15-327 | AA358923. |
| HLHAE04 | 30 | 933056 | 1-414 | 15-428 | AA358857, and AA358926. |
| HLHAE29 | 31 | 503186 | 1-208 | 15-222 | AA358930. |
| HLHAE30 | 32 | 857041 | 1-195 | 15-209 | AA358932,AA358931, and AC007878. |
| HLHAE35 | 33 | 503189 | 1-349 | 15-363 | AA358958. |
| HLHAES4 | 34 | 503264 | 1-307 | 15-321 | AA358976, and AA358970. |
| HLHAH45 | 35 | 932843 | 1-308 | 15-322 | AA359011. |
| HLHAL02 | 36 | 921350 | 1-90 | 15-104 | AA359061, AA359060, and AC004835. |
| HLHAM69 | 37 | 509151 | 1-289 | 15-303 | AA359138, AA359914, and T20114. |
| HLHAN75 | 38 | 925451 | 1-375 | 15-389 | AA359173. |
| HLHAO42 | 39 | 509082 | 1-289 | 15-303 | AA359124, and AC004695. |
| HLHAR25 | 40 | 677469 | 1-315 | 15-329 | AA359234, AL135643, F13749, D58782, A58782, AI567391, AI751162, AW162288, AI696793, H43183, |
| | | | | | T60699, AW105340, AA837715, AA654874, AA904275, T96684, AA311535, N64587, AA204855, |
| | | | | | AI249688, A1962094, A1054326, AL120976, AA658320, AI299050, Z98051, Z85986, AC005399, |
| | | | | | Z83844, AC005562, Z93017, AL035410, AL031255, Z98749, AC005183, AF111168, AL049766, |
| | | | | | Z82206, Z98036, AC007546, Z70280, AC003070, AD000092, AC005670, AC010168, Z98950, |
| | | | | | AC004150, AC008134, AC004858, AL121603, AD000812, AL022312, U47924, AL021391, Z99716, |
| | | | | | Z93020, AC005914, AC006285, AP000503, AF109907, Z97876, AL022237, Z93241, Z930023, |
| | | | | | AF134726, AC002565, AC002430, AC016025, AC005300, AF006501, AL049759, AL035415, |
| | | | | | AC004890, AL049301, Z98882, AC007384, AL035455, AC007011, AC003029, AC004913, L78833, |
| | | | | | AC002553, AG006544, AC005488, AC004832, AL034421, AC005355, AC006101, U91321, U91322, |
| | | | | | AL035450, AC007308, AC006468, AL080243, Z82244, Z82215, AL035458, AL024498, AL049780, |
| | | | | | AL031005, AC008041, AC005971, AC002126, AF064864, AF165176, AL078477, AC007845, |
| | | | | | AC006571, AC003006, AF069291, AC007421, AC005839, AC005284, AL121748, Z83851, AC004033, |
| | | | | | AC003071, AF031078, AC005074, AC002470, AC007099, AC004560, AL035400, AP000008, |
| | | | | | AC004791, AC007551, AC005859, AC005529, AC002400, AC005067, M17262, AF030876, AC004253, |
| | | | | | AC005523, AL109952, Z68192, AL049839, AC006441, AL022345, AL035587, AC004453, AC005913, |
| | | | | | AL096701, AC006023, AC006064, AC005057, AC006211, AF003636, AC005846, AF003529, |
| | | | | | AF111163, Z83845, AP000692, AC004966, AF117829, AC004821, AC002563, AL035696, AC004212, |
| | | | | | AC002431, AL109798, AP000704, AC005102, Z83846, AL049776, AC004686, U85195, AL109627, |
| | | | | | AC005207, AF196779, AC005187, Z97196, AC007371, AC002301, AE000658, AC005318, AC003102, |
| | | | | | AP000151, L34079, AL109984, AC005996, AC002558, AC005225, AL034419, AC005482, AC004009, |
| | | | | | AC004770, AC004019, AC006241, AC005231, AL049713, AL096703, AL096791, U91326, AC005520, |
| | | | | | AP000501, AC005480, AP000555, Z98200, AC002314, AC004703, AP000152, AC005531, AL031447, |
| | | | | | AC005696, AF111167, AB015355, AL009181, AC002351, AL049745, AC004883, AP000502, |
| | | | | | AC002117, AP000512, AL031311, AL008583, Z84487, AC006538, AC005933, Y18000, AC004143, |
| | | | | | AC005527, AC008079, AC005086, AC005015, AC002477, AC005378, AC005049, AC005730, |
| | | | | | AC006536, AC002476, AC004815, AC005288, AC006509, AC002544, AC006512, AC002350, |
| | | | | | AC005754, AL008735, AC005881, AL022316, AC012599, AC005037, AC005152, AL035071, |
| | | | | | AC004475, AL049539, AC006344, AB023050, AC002425, AF038458, AC002070, AC002045, |
| | | | | | AC002375, and AC006360. |
| HLHAS70 | 41 | 727840 | 1-324 | 15-338 | AA359967, AA359314, AL039395, R59278, AA307901, R35023, AA019568, T84879, AA371441, |
| | | | | | Z46128, AA082079, H08904, AA331923, AW246202, AA350169, AW392428, AA207226, AA359708, |
| | | | | | A1076095, R12630, H08352, AW167577, AA371174, AA333455, AA446987, and AL050286. |
| HLHAS94 | 42 | 509065 | 1-307 | 15-321 | AA359331, AC002403, AJ006345, and U90095. |
| HLHAU38 | 43 | 927819 | 1-346 | 15-360 | AA359373. |
| HLHAV2O | 44 | 509053 | 1-269 | 15-283 | AA359353, and AA359437. |
| HLHAX61 | 45 | 509047 | 1-471 | 15-485 | A1039941, AA359510, AA359905, AA508734, A1431345, AA722473, and Z93242. |
| HLHAY72 | 46 | 509041 | 1-270 | 15-284 | AA359584. |
| HLHAZ63 | 47 | 745615 | 1-313 | 15-327 | AA359540, and AL022069. |
| HLHAZ94 | 48 | 523061 | 1-317 | 15-331 | AA359606. |
| HLHBA74 | 49 | 960487 | 1-253 | 15-267 | AA359663, and AA359654. |
| HLHBC30 | 50 | 910079 | 1-568 | 15-582 | A1366170, AA047627, AA047570, W21960, W22094, W22769, AA359453, AA359449, AA128575, |
| | | | | | AI220321, and W22833. |
| HLHBD62 | 51 | 948847 | 1-2412 | 15-2426 | AI149252, A1129315, A1066598, AA209453, A1949136, AW006872, AI417550, AI765773, AI949458, |
| | | | | | AI808820, AA563606, AI417820, AI580509, AW071618, AI143614, AI816719, AI949334, AW104313, |
| | | | | | AW068384, A1470109, A1334383, N80192, AA461211, AA469086, R83163, W05827, AI248067, |
| | | | | | W90171, AI240428, AI500558, AA209359, AI697255, AI470120, AW027413, AW300950, AI349376, |
| | | | | | AA333289, AI625718, AI887780, N53163, W01349, W90583, AI307153, AA242883, AI273473, |
| | | | | | H63479, AI383437, AA705772, AA946651, AA946651, AA400964, AA252165, AI935959, AI678702, W80384, |
| | | | | | AI185396, AL047205, AA885731, AI913868, T55118, AW439355, AW021750, H89812, AA252890, |
| | | | | | AA460909, AW020375, AW083913, AI589484, N68643, W07353, H60392, AA329018, AI284654, |
| | | | | | H89751, W74076, AA363062, H47176, AA773798, AI961805, N80845, AW067922, AA331004, |
| | | | | | N58600, AA326487, AA993974, Z41093, AW005714, H81136, H26666, AL045687, R83164. |
| | | | | | AW088426, H63422, H81041, AA400941, AL045686, T36161, AI277154, T55284, D79631, N77870, |
| | | | | | AI382322, N57589, AA298030, AI866051, AA678865, H59519, W79683, N55835, H47086, and |
| | | | | | W38483. |
| HLHBW56 | 52 | 732581 | 1-294 | 15-308 | AA360081, AA360080, F37192, F00608, F28958, AI612770, H64539, AA225175, AA670153, |
| | | | | | AA853473, AW305371, AW438702, H73245, AI033445, AI284023, AI688795, AA913723, H77940, |
| | | | | | AI370470, AI559399, AI590042, AI343078, AI791909, AA329535, R19275, AI864813, AA004958, |
| | | | | | AA070836, T77934, AA137013, AA323439, AA150589, AI696854, AI014798, AI246331, N57939, |
| | | | | | AI332671, H51047, AI681979, AI679747, N71581, T94072, AL033527, AC006057, AC006006, |
| | | | | | AC005004, AC004691, AC005291, AC004382, AL034555, U91321, AL135744, AL034548, AL035608, |
| | | | | | AC007501, AC009294, AC008372, AF108083, AC005486, AL139054, AC005412, AC006468, Z84466, |
| | | | | | AL009172, AL030999, AL121603, AL080243, AP000279, AC004112, AC004841, AC009247, |
| | | | | | AL031311, AP000038, AP000106, AC002492, AL049776, AC000353, AC000085, AC004686, |
| | | | | | AL034420, AC005015, AC006064, Z81357, AB023049, AC002127, AC000094, Z98304, AL024498, |
| | | | | | AC003666, AC007429, AL049748, AC005971, AC003002, AL049648, AL031432, AL079342, |
| | | | | | AL035086, AC004583, AC002559, AB014087, AC004190, AP000516, AL031291, AC006199, |
| | | | | | AC002511, AC006014, AC002563, AC005668, AC004966, AL020995, AC008040, AL033521, |
| | | | | | AL022721, AB004907, Z98941, AC003003, AF121781, U96629, AL022578, AC002996, AL035458, |
| | | | | | AC006160, AC004638, AC005476, AC005765, AC005914, AL031846, AL035417, Y10196, AL020997, |
| | | | | | AC004967, AL121658, AC006111, AP006111, AP000160, AP000018, AC007537, AC005043, AF165926, |
| | | | | | AC004883, AC007934, AC002316, AC004448, AL023694, U47924, AF001552, AL031843, AF196969, |
| | | | | | AC004525, AC005317, AC002302, AL021878, AC003665, AC005820, AC005067, AF008243, |
| | | | | | AC007386, AJ246003, AC004019, AP000959, AP000512, AC007151, AC006953, AL031297, |
| | | | | | AC006208, AL133163, AL022238, AP000151, AC005031, AP000555, Al031003, AL049869, |
| | | | | | AC007406, AC007277, Z95113, AC020663, AL049692, AC007226, AC002504, and AC003007. |
| HLHBZ70 | 53 | 508939 | 1-259 | 15-273 | AA360137, AA359828, and AC002519. |
| HLHCA32 | 54 | 564921 | 1-291 | 15-305 | |
| HLHCCI6 | 55 | 825551 | 1-268 | 15-282 | AA359105, and D83781. |
| HLHCC48 | 56 | 919282 | 1-346 | 15-360 | AA358998, N40518, AA843439, AA36003 |
| | | | | | AA883927, AA310366, and AL137523. |
| HLHCC94 | 57 | 974241 | 1-689 | 15-703 | |
| HLHCD06 | 58 | 960648 | 1-318 | 15-332 | |
| HLHCD15 | 59 | 857037 | 1-113 | 15-127 | AA359154. |
| HLHCD46 | 60 | 719344 | 1-276 | 15-290 | AA358854, AF145710, AF145711, AF091486, AB023185, J02942, X87142, and X14836. |
| HLHCD90 | 61 | 524079 | 1-414 | 15-428 | T61155. |
| HLHCE56 | 62 | 961054 | 1-319 | 15-333 | AA359801. |
| HLHCE83 | 63 | 535294 | 1-401 | 15-415 | AA359750. |
| HLHCF92 | 64 | 585495 | 1-389 | 15-403 | AA358761, and AJ242978. |
| HLHCG45 | 65 | 508621 | 1-329 | 15-343 | AA360111. |
| HLHCH02 | 66 | 921089 | 1-367 | 15-381 | |
| HLHCI90 | 67 | 530632 | 1-299 | 15-313 | |
| HLHCK62 | 68 | 575320 | 1-484 | 15-498 | R08918, AA262464, R58559, AA493136, AI11895, AI950983, AI271126, AA455670, AA861175, |
| | | | | | R47236, T41247, AA654781, AA613627, AI7544336, AA776684, AL138396, AI457397, AW402237, |
| | | | | | A1696595, AW023990, AA618452, AA634853, AI470646, AI249573, AA493894, AL118991, |
| | | | | | AA774059, Z22609, AF034176, A1791913, AI792133, AA218835, AI821714, T47093, AL041619, |
| | | | | | AA833896, AA833875, AA533333, A1908575, T98340, AA634147, AI431303, AI754253, AA002063, |
| | | | | | AA515462, AW189068, AA487888, H93097, AL045813, AA64320, AA515443, AA610688, T58444, |
| | | | | | H61452, AA503039, AL047427, AA630672, AI275982, AI633025, AA508359, AI573198, AA610491, |
| | | | | | AA487971, A1284111, AA516058, AL046409, AI745325, AA515644, AL134691, AA640986, |
| | | | | | AA515440, AA206721, A1821785, AJ815210, AI216054, T09124, AA689587, AA483771, AP000301, |
| | | | | | AF039906, AP000045, AP000114, AC005229, U73024, AL080316, AC003038, AC004447, Y10196, |
| | | | | | AC004849, AL023879, AC005730, AP000302, AL031905, AP000246, AC002511, AP000207, |
| | | | | | AP000129, AL031588, AL079342, AC007130, AJ246003, AL031984, AC002994, Z94801, AC005081, |
| | | | | | AL021579, AC004477, AL031118, U91327, AC005519, AC005746, AC003950, AC007051, AC007919, |
| | | | | | AC007877, U82668, AP000356, AC005663, AC005015, AC005412, AC006210, Z49866, Z82172, |
| | | | | | A0006960, AC007666, AC005399, AL021808, AC000052, AC005071, AC007225, AC004019, |
| | | | | | AF134726, AF165926, AC008085, AC004675, AL022328, AP000299, AC005264, AC005596, |
| | | | | | AC005262, AC012331, AC005482, AC002308, AL133353, AL031283, AC004887, AC005089, |
| | | | | | AC004382, AC007786, AC004967, AP000079, AF111169, AP000503, Z68289, AC000099, AF147358, |
| | | | | | AL121655, AL049780, AC007055, Z86090, AC007392, AL022319, AC006211, AC007617, AF047677, |
| | | | | | Z82178, AC006974, AC002119, AL023656, AC002996, AF165176, AL031427, U85195, AL096699, |
| | | | | | U47924, AC002470, AE000658, AC006509, AC005921, AP000113, AP000569, Z93930, AP000694, |
| | | | | | AC004456, AC005878, AL031431, AC002350, AC005772, AC007182, AC004974, AL035604, |
| | | | | | AF088219, AC005152, AB020863, AC008122, AC002310, AL110502, AC002400, Z83844, AL080243, |
| | | | | | AP000501, AC006511, AC011311, AC007308, AC005099, X69951, AC004780, AC005330, AL022320, |
| | | | | | AL109623, AC002483, Z93929, AC007064, AC007064, AC009247, AC006512, AC002312, AC008014, AC008064, |
| | | | | | AC004963, AB019440, AC008040, AC005274, U66060, AC005288, AC012039, AF207550, AL021707, |
| | | | | | AC005837, AF165147, AL022394, AC020663, AC007270, AC007270, AC005235, AC003664, Z99716, AC002429, |
| | | | | | AC004905, AC004087, AC004553, U29953, and AP000261. |
| HLHCK90 | 69 | 523986 | 1-336 | 15-350 | |
| HLHCN92 | 70 | 558029 | 1-330 | 15-344 | A1052007. |
| HLHCO33 | 71 | 723986 | 1-316 | 15-330 | AA340348, A1571802, A1372548, A1372547, AI040013, F24390, F37028, AA716147, AA374314, |
| | | | | | F28910, AA558985, AJ360665, AA399534, AI081119, AI149702, T15411, N77435, AA551992, |
| | | | | | AA427925, A1721190, A1089753, AA651795, AI095329, AW006920, AI077933, AI475545, AI131307, |
| | | | | | AA808445, A1971871, A1801147, AL336167, H88715, AI073748, AA704786, AW026225, AA532395, |
| | | | | | AA455119, AA961711, A1422092, AA722364, AA196791, AI359786, AW165969, AI142986, |
| | | | | | AA211394, AW043616, F13032, AI813592, AW073409, AW385219, AW014662, AI763129, AI521454, |
| | | | | | AA720579, AA037220, A1372542, AA628460, AA628473, H88668, N52473, AA131220, AI372545, |
| | | | | | AA088241, N90918, AI147813, AA480186, AI073595, AI970558, N95489, AI372546, T82863, |
| | | | | | W28167, AI308967, W49744, AA025137, N63318, AA150492, AA025153, N25857, AI038227, |
| | | | | | AI282935, AI086781, T40566, AW361919, AA401914, AI962112, AI865509, AW265039, W49660, |
| | | | | | AI439076, T33367, T33224, T33052, W00646, AI797304, T27093, WI6826, AI872070, AI016415, |
| | | | | | T33086, AF210052, AF193844, and AB033603. |
| HLHCP18 | 72 | 823470 | 1-349 | 15-363 | |
| HLHCQ17 | 73 | 523063 | 1-185 | 15-199 | AA359535. |
| HLHCQ26 | 74 | 530637 | 1-198 | 15-212 | |
| HLHCS34 | 75 | 974208 | 1-448 | 15-462 | AC006417. |
| HLHCTO6 | 76 | 960650 | 1-353 | 15-367 | |
| HLHCT23 | 77 | 509044 | 1-347 | 15-361 | AA359558, AA359819, AC000052, and AC004019. |
| HLHCT27 | 78 | 960308 | 1-304 | 15-318 | AC002520, AC000032, and AC000031. |
| HLHCU31 | 79 | 954273 | 1-254 | 15-268 | |
| HLHCU38 | 80 | 968618 | 1-299 | 15-313 | AC002299. |
| HLHCX78 | 81 | 508786 | 1-343 | 15-357 | AA358947, AA654307, and AF061022. |
| HLHDC26 | 82 | 529735 | 1-143 | 15-157 | |
| HLHDD01 | 83 | 921640 | 1-249 | 15-263 | AA584224, N63891, AA728911, AA633565, AA649710, AA579189, AA302980, AA234445, |
| | | | | | AA664086, AA650132, AA658496, AA57773, AI279182, AI268120, C18651, AA650428, AI732764, |
| | | | | | AI299633, AW440124, AI821863, AI821865, AI821118, AL039327, AC007655, AL096801, |
| | | | | | Z97054, AC005071, AC005940, AL109613, AC008044, AL122127, AC004878, AL132823, AL050318, |
| | | | | | AC002351, AC006014, AC000127, AL031178, AL021394, AC005232, A84742, U65590, AC008169, |
| | | | | | AC005488, AL022238, AC003988, AC005581, AL031767, AL035555, AF187967, and D79206. |
| HLHDK22 | 84 | 529772 | 1-344 | 15-358 | |
| HLHDL63 | 85 | 506958 | 1-388 | 15-402 | AA359597, and AA359520. |
| HLHDR39 | 86 | 523499 | 1-444 | 15-458 | |
| HLHEB33 | 87 | 576260 | 1-113 | 15-127 | |
| HLHEG01 | 88 | 857006 | 1-255 | 15-269 | AW103916, and AL133353. |
| HLHEG38 | 89 | 578741 | 1-340 | 15-354 | |
| HLHEQ31 | 90 | 857009 | 1-341 | 15-355 | AA653291, A1306717, A1283938, T40629, R67701, AW008184, AI417586, AI814961, AA558404, |
| | | | | | D51877, AA371410, AA35 1893, W63553, AA837771, AA568204, AA570740, AA483606, AA904211, |
| | | | | | AA665532, AA302978, F29968, AW303098, AA385775, AI003391, AA525331, AI446623, AA078509, |
| | | | | | F32668, N52501, AA230146, AA434078, AW1032251, AI885465, AW089625, AW238016, AI049955, |
| | | | | | AA757426, A1187148, N54538, D51809, AW020198, AA516192, AI7191659, F25301, AI679045, |
| | | | | | AW401509, AA955031, R96621, H72278, H47295, AI370170, H25938, AA525753, R44593, |
| | | | | | AA496309, AA668587, AW247338, AA484892, AA587215, AI858272, AI189682, AA363311, |
| | | | | | AA228979, AA229823, H79586, AI206841, AA218874, T73016, AA629412, AI749306, AA528791, |
| | | | | | R83068, A1760700, AA015948, AA594035, AW069273, AI267356, AA122310, AI819419, AA679353, |
| | | | | | A1267450, W39287, A1049986, AA449468, Z83846, Z98047, AC003682, AC008273, AL109628, |
| | | | | | S42653, AC008041, AC005480, AC007993, Z83843, AC003695, AC005274, AL031680, AC002551, |
| | | | | | AC006959, AC005911, AC005793, AC005874, AF134471, X51956, AL050332, AC006487, AC006458, |
| | | | | | AC005175, AP001053, AF196779, AC002091, AC000068, AL096701, AC007263, AL023807, |
| | | | | | AC005231, AC020663, AC002544, AC005702, AF196969, AL096678, AC005057, AL034420, |
| | | | | | AP000252, AC005102, AD000092, AC005017, AL035684, AL049646, AC004796, AC006367, |
| | | | | | AC008044, Z84466, AC006241, AF190465, Z83826, AC005225, AC005755, AC008072, AC006966, |
| | | | | | AL034555, AL031276, AL049872, AL121760, AC006543, AP000555, AL121603, AC005368, |
| | | | | | AP000144, AC005722, AC002492, AC005067, AC006468, AL132987, AC004975, Z97054, AC005829, |
| | | | | | AC006251, AC007021, AP000510, AC004841, AP000030, AL035071, AC005837, AR036572, U91328, |
| | | | | | AC004990, AC007226, AC006026, AC007785, AP000691, Z98304, AC006111, AL022165, Z93930, |
| | | | | | AC002996, AC005200, AC005753, U95739, AC005228, AC006544, AC004019, Z83841, AC002400, |
| | | | | | AC006530, Z84480, AC004024, AL078638, AC003965, AC006441, AC004675, AC004922, AC005839, |
| | | | | | AC005182, AL031733, AL050348, M89651, AL021366, AF001549, AC002418, AC005664, U63721, |
| | | | | | AG006023, AP000121, AC005884, Z83844, Z84487, AF088219, U47924, AC008101, AC006312, |
| | | | | | AL050318, AC000052, AC006512, AL031311, AL034379, AC006121, AC005412, AC003692, |
| | | | | | AC004386, AC005670, AC005666, AC002477, AL133035, AC005284, AF030453, AL031659, |
| | | | | | AC005072, AC005089, AG005544, AC008079, AC007200, AC004531, AC004000, AC004076, |
| | | | | | AB023048, AC005355, AL008726, AC012384, AB020690, AC005868, AC005088, AL109967, |
| | | | | | AL133445, AL035405, Z98752, U91326, AC005104, Z98749, AL109984, AF165926, AL034421, |
| | | | | | Y10196, AC002094, AC005220, U91323, AC004849, AC018633, AC005255, AL022313, Z98745, |
| | | | | | Z95115, AC003663, AC002126, AL121655, AC005527, AL021918, AB003151, AP000688, Z94722, |
| | | | | | AC007193, AC005772, AL078602, AL050307, AB015355, AC005081, AC006088, AC000353, |
| | | | | | AD000671, AL049643, AP000212, AP000134, AC006079, U82671, AC003065, AC005529, AC007367, |
| | | | | | M87914, AP000694, AL096775, AC002425, AL121653, AC006581, AF129756, AC004819, Z82214, |
| | | | | | AL031282, X02571, M12901, AC007546, AC005678, AL035461, AL109963, AC002082, AL109799, |
| | | | | | AP000695, AL033397, AC018769, AC007055, AC006501, AL049761, AC005033, AC006130, |
| | | | | | AC006236, AC004477, AL031685, AL022721, Z98750, AL031291, U78027, AC008009, AC006449, |
| | | | | | AF006752, AC007129, Z85987, AC009516, AC004383, AL049570, AP000099, AC005914, AC005288, |
| | | | | | and AC004583. |
| HLHBR95 | 91 | 576495 | 1-218 | 15-232 | AI821777, and AB018299. |
| HLHEV70 | 92 | 506397 | 1-601 | 15-615 | R15853, R37118, H17444, and T66479. |
| HLHEY75 | 93 | 856987 | 1-140 | 15-154 | |
| HLHFG79 | 94 | 832594 | 1-334 | 15-348 | H95186, AA461610, AA306808, AW405457, AA338381, AA304978, AL119998, AA429180, and |
| | | | | | N40665. |
| HLHFJ5S | 95 | 576357 | 1-303 | 15-317 | |
| HLHFM14 | 96 | 576237 | 1-434 | 15-448 | |
| HLHFQ56 | 97 | 725328 | 1-338 | 15-352 | |
| HLHFR56 | 98 | 840142 | 1-257 | 15-271 | |
| HLHFS84 | 99 | 576441 | 1-508 | 15-522 | |
| HLHFTI5 | 100 | 576451 | 1-302 | 15-316 | AC007263. |
| HLHFUO9 | 101 | 964823 | 1-431 | 15-445 | N48128, N38982, AA478369, AA419225, H59454, AC004883, AC005277, AL022323, AL031279, and |
| | | | | | AL035633. |
| HLHFU53 | 102 | 576228 | 1-412 | 15-426 | |
| HLHGC43 | 103 | 714438 | 1-99 | 15-113 | |
| HLHGH72 | 104 | 576242 | 1-326 | 15-340 | AL117258. |
| HLHHQ95 | 105 | 502827 | 1-236 | 15-250 | |
| HLHSA08 | 106 | 973520 | 1-606 | 15-620 | |
| HLHSA46 | 107 | 857043 | 1-324 | 15-338 | AA358607. |
| HLHSB08 | 108 | 960402 | 1-360 | 15-374 | AL021978. |
| HLHSB14 | 109 | 526213 | 1-355 | 15-369 | |
| HLHSB25 | 110 | 526210 | 1-197 | 15-211 | AW103198. |
| HLHSE61 | 111 | 503281 | 1-325 | 15-339 | AA358909, AC006972, AC006384, and AC006984. |
| HLHSG28 | 112 | 503381 | 1-354 | 15-368 | AA358769. |
| HLHSJ02 | 113 | 856983 | 1-388 | 15-402 | |
| HLHSI24 | 114 | 973701 | 1-619 | 15-633 | AC007262. |
| HLHSI51 | 115 | 526201 | 1-279 | 15-293 | |
| HLHSJ39 | 116 | 508649 | 1-229 | 15-243 | AA359701. |
| HLHSK26 | 117 | 921007 | 1-263 | 15-277 | R73260. |
| HLHSK41 | 118 | 522503 | 1-274 | 15-288 | |
| HLHSK60 | 119 | 742366 | 1-321 | 15-335 | |
| HLHSK84 | 120 | 526155 | 1-323 | 15-337 | |
| HLHSL08 | 121 | 960393 | 1-418 | 15-432 | F23307, AA496309, H67064, AA364988, AI929796, AA493226, AA595504, AA654482, AA808861, |
| | | | | | AA593471, AA483211, A1872000, AA360260, AL042630, AA513884, R74433, AW419389, R52008, |
| | | | | | AA225358, AA525293, AA953583, AW304536, AI572680, AI918419, AI358712, AA713735, |
| | | | | | AW162750, AW188976, A1866971, AA429481, AI345497, AA706202, AA984829, AI207476, |
| | | | | | AF111168, AP000501, AL022163, AP000689, U95743, D87675, U95741, AP000141, AL022316, |
| | | | | | AC005544, AC004985, AC003041, AC006965, Z68273, AC002425, AC005412, AL022721, AC002381, |
| | | | | | AC006241, AC008101, AC005755, AC002477, AC016027, L78833, AC016830, AL109801, AP000036, |
| | | | | | AC004973, Z99127, U89337, AC004500, AC005387, AC007688, AC006088, AC002404, AC002126, |
| | | | | | AL109627, AC007308, AC002996, AL031602, AL035454, AL024474, AC007040, AF207550, |
| | | | | | AC005622, AL133246, AL022336, AP000065, AL031848, AC003663, AF001548, AC006450, |
| | | | | | AL049830, AL022326, Z83838, AC005231, AC006449, AF047825, AC005358, AC005841, AL031291, |
| | | | | | AC005874, AF134471, AC000379, AC008134, AC006125, AC002565, AC005332, AC005971, |
| | | | | | AC004143, AC007240, AL020993, AC006274, AC002312, AL035072, AC006441, Z84480, AL022334, |
| | | | | | Z93244, AL109827, AP000496, AP000356, AC006430, AC006312, AC004491, Z74739, AC002115, |
| | | | | | AL121655, AC005399, AC004125, AL049872, AC003667, L78810, AC005630, AC005793, AC004883, |
| | | | | | AC003962, AC006501, AC005081, AL031311, AL023803, Z82243, AL049694, AC007263, AC006530, |
| | | | | | AP000355, AJ246003, AC007686, AC004099, AP000555, AL031577, U63721, Z95114, U95742, |
| | | | | | AL136453, AC006239, AC005102, AL122020, AF001549, U07000, AC009330, AC007216, AC005940, |
| | | | | | AP000088, AC002551, AP000557, AC007283, AC009275, AC005609, AC002430, AP000500, |
| | | | | | AL121748, AC002476, AC006480, AC006509, AL034420, AC007384, AL133382, AC004253, Z84469, |
| | | | | | AC006057, AP000466, AC003108, AL078638, AC004805, AL031255, AC005189, AC006211, |
| | | | | | AC005527, AC005015, AL024507, AC005392, AC004098, AC004212, AL135744, Z98884, AC005829, |
| | | | | | U91324, AC007011, AC006079, AC005363, AC007055, AP000511, U91326, AL049776, AC002492, |
| | | | | | AC008040, AL096701, AL049869, AC002070, AL022165, A:050309, Z98950, AC005225, AC004834, |
| | | | | | AP000346, AL035089, AP000128, AP000206, AL049832, AF134726, AC009516, AC005520, |
| | | | | | AC004922, AL117338, AL031053, Z85986, AC004134, AL031230, Z95115, AP000245, AL022313, |
| | | | | | AC002316, U96629, AL021578, AC005529, AC002558, Z84466, AC005921, AC005519, AC002984, |
| | | | | | AL035683, AC006270, AC005972, AC008055, AC003007, AC003012, AL135783, AF118808, |
| | | | | | AP000115, AC002350, AF064861, AL117258, M87889, AC005207, AP000556, AL021394, and |
| | | | | | AC002543. |
| HLHSL10 | 122 | 968628 | 1-203 | 15-217 | |
| HLHSL59 | 123 | 688076 | 1-319 | 15-333 | |
| HLHSL78 | 124 | 526167 | 1-485 | 15-499 | AC005015, AL022165, AC004837, and AF029308. |
| HLHSL95 | 125 | 887981 | 1-325 | 15-339 | AA359533. |
| HLHSM15 | 126 | 519871 | 1-419 | 15-433 | |
| HLHSM27 | 127 | 535340 | 1-344 | 15-358 | AA359197. |
| HLHSM52 | 128 | 964827 | 1-659 | 15-673 | AW028761, A1300934, A1521856, AI350356, AA587396, AI971640, AA723566, H99635, AI479249, |
| | | | | | AI190430, AI768184, and R80415. |
| HLHSM6S | 129 | 753937 | 1-294 | 15-308 | AC007126, AC002465, and AC007091. |
| HLHSM92 | 130 | 856979 | 1-320 | 15-334 | U47924. |
| HLHSNOS | 131 | 932868 | 1-171 | 15-185 | |
| HLHSN5I | 132 | 503261 | 1-363 | 15-377 | AA358973. |
| HLHSN88 | 133 | 502830 | 1-137 | 15-151 | |
| HLHSPO9 | 134 | 960889 | 1-339 | 15-353 | |
| HLHSP67 | 135 | 526203 | 1-249 | 15-263 | R13139, and AB014573. |
| HLHSP92 | 136 | 526097 | 1-348 | 15-362 | Z69304. |
| HLHSQ52 | 137 | 526260 | 1-393 | 15-407 | |
| HLHSQ71 | 138 | 509073 | 1-392 | 15-406 | AA359260, and AL031284. |
| HLHSQ84 | 139 | 678457 | 1-369 | 15-383 | |
| HLHSS07 | 140 | 954363 | 1-344 | 15-358 | AC005866. |
| HLHSSS3 | 141 | 519887 | 1-333 | 15-347 | |
| HLHST73 | 142 | 954914 | 1-382 | 15-396 | AW004019, AI989827, AA358808, and AA359354. |
| HLHSU30 | 143 | 933054 | 1-241 | 15-255 | AA359005, and W27744. |
| HLHSU75 | 144 | 961081 | 1-389 | 15-403 | AA359280. |
| HLHSV08 | 145 | 973783 | 1-638 | 15-652 | A1580669, H60912, R99532, AA639260, AI824706, AF001548, AL139054, AC005304, AL033543, |
| | | | | | AF165926, AC002477, AC004854, AC007566, AC004531, AL049869, AL049794, AL035684, |
| | | | | | AL133448, AC005180, AL034420, AL031285, AC007041, AL109963, AC002119, U91321, AC007021, |
| | | | | | AC005747, AL009181, AL049844, AC005696, AC006966, AC004491, AC004933, AB001523, |
| | | | | | AC003042, AC004686, AC004893, U72788, AC002316, AC005514, AC005591, AC007899, AL133243, |
| | | | | | AL035458, AC005225, AL049539, AC006101, AL049839, AC007285, AC004000, AF001552, |
| | | | | | AP000068, AC002394, AL034417, and AL022313. |
| HLHSV30 | 146 | 522505 | 1-432 | 15-446 | |
| HLHSV82 | 147 | 526110 | 1-351 | 15-365 | |
| HLHSW37 | 148 | 537265 | 1-344 | 15-358 | AA358739. |
| HLHSX01 | 149 | 973523 | 1-511 | 15-525 | |
| HLHSX48 | 150 | 973780 | 1-568 | 15-582 | |
| HLHSZ60 | 151 | 522517 | 1-344 | 15-358 | AW029565, AC002542, AL050318, AC005763, AC005914, AC004253, and AC004030. |
| HLHSZ69 | 152 | 526190 | 1-307 | 15-321 | |
| HLHTA93 | 153 | 668792 | 1-307 | 15-321 | T12048. |
| HLHTC07 | 154 | 933057 | 1-360 | 15-374 | AA358660, and Z84478. |
| HLHTC21 | 155 | 856980 | 1-351 | 15-365 | AI168345, AA406609, A1275431, AJ280460, and AC005746. |
| HLHTC52 | 156 | 728746 | 1-312 | 15-326 | |
| HLHTC54 | 157 | 508050 | 1-327 | 15-341 | |
| HLHTC65 | 158 | 522510 | 1-347 | 15-361 | AC009178, and AC007790. |
| HLHTC67 | 159 | 960701 | 1-347 | 15-361 | |
| HLHTC87 | 160 | 857038 | 1-214 | 15-228 | AA297993, A1650584, and AA297533. |
| HLHTD08 | 161 | 925491 | 1-412 | 15-426 | AA768076. |
| HLHTD61 | 162 | 856970 | 1-250 | 15-264 | AA359725, AL035587, AF118808, AL049856, AC005940, and AC002316. |
| HLHTK72 | 163 | 509040 | 1-207 | 15-221 | AA359588, U90095, and AJ006345. |
| HLHTL62 | 164 | 509078 | 1-305 | 15-319 | AA359237, and AA604618. |
| HLHTM94 | 165 | 509048 | 1-344 | 15-358 | AA359512. |
| HLHTN36 | 166 | 508937 | 1-256 | 15-270 | AA359830. |
| HLHTO48 | 167 | 508959 | 1-288 | 15-302 | AA359633. |
| HLHTP70 | 168 | 525574 | 1-262 | 15-276 | |
| HLJBD62 | 169 | 558975 | 1-607 | 15-621 | A1830008, AW027300, A1492254, A1963362, AA910855, AI826880, AA704060, AA962722, AI381989, |
| | | | | | AI888784, AA600008, AW014543, AI244281, AI372076, AA908880, AI984161, R60753, AA688028, |
| | | | | | AA602732, N45372, AI279783, AA256789, AA406536, AI435974, AA918507, AI000917, AA782466, |
| | | | | | AI079275, AI041741, AI192069, AI244633, AA534440, AI828659, AI027064, AA533193, AI378913, |
| | | | | | AA643580, AA113765, W39714, AI201853, AA406535, AW074155, AA653022, AA148835, |
| | | | | | AA977384, W15492, R37489, F25462, AA858404, F35723, AI623141, AI125514, C04944, AA255456, |
| | | | | | AA976165, AI282763, N32061, AA532819, N83866, W32346, W02081, AA470789, AA551855, |
| | | | | | AW392670, U46346, AW384394, AW363220, AL119444, AL119497, AW372827, U46347, U46341, |
| | | | | | AL119319, AL119443, AL119484, AL119457, AL119396, AL119324, Z99396, AL119363, AL119341, |
| | | | | | AL119391, AL119355, U46350, U46351, U46349, AL119335, AL119483, AL134528, AL119439, |
| | | | | | AL119496, U46345, AL134533, AL119522, AL119522, AL134518, AL119399, AL134538, AL134524, AL037205, |
| | | | | | AL042433, AL042614, AL042544, AL119418, AL042450, AL042965, AL042975, AL043003, |
| | | | | | AL042970, AL042542, AL043019, AL042984, AL043029, AL042551, AL119464, AL119488, X61100, |
| | | | | | J02877, AB026436, AR054110, A81671, AR060234, AR066494, and AR069079. |
| HLJBE19 | 170 | 953727 | 1-273 | 15-287 | |
| HLJBH91 | 171 | 840250 | 1-861 | 15-875 | AW410844, A1521525, AW020150, AA493808, AA828045, AW265468, N71729, A1590442, |
| | | | | | AW151541, AW085751, AA669238, AA555232, AI355246, AI926102, AA489390, AW162314, |
| | | | | | AL121039, A1753904, A1702049, AL041375, AW151247, AW337282, AI801563, AA525753, |
| | | | | | AI568376, AI114543, AW104161, AA469230, AI064968, AI114657, AA135761, AW148821, |
| | | | | | AA747234, A1745116, AW192419, N68677, AW021774, AA503307, AI053673, AA525807, AI797998, |
| | | | | | AA642809, A1537368, AA573067, AL118598, AA577706, C05696, AI791659, AA584241, AW272389, |
| | | | | | AA720582, A1572680, AA526508, AI821901, AI360521, AI433952, AI065031, AA484892, AA810158, |
| | | | | | AW021917, AA557945, AA507499, AW023111, AI051670, AW328331, AI284640, AI888017, F23338, |
| | | | | | AA676592, AA838120, AI935827, N29105, AW192930, AI821287, AA639155, AL138262, AW243808, |
| | | | | | AA846923, AJ445699, AW162332, A1753131, AW419389, AA533040, I107953, T74524, AW020198, |
| | | | | | AL039117, AA515176, H93717, AW069110, AW341955, AA630476, AW250029, AA666295, |
| | | | | | AI583532, AA297208, AA995373, AW089625, AA132929, AW341882, AI857366, T07225, AL133312, |
| | | | | | AC004981, AC005207, AP000133, AP000211, AC004587, AC007371, Z95152, AC005736, AC005696, |
| | | | | | AC005630, AC004929, AC006449, AC006111, Z94801, AC004134, AC004921, Z86090, AL132987, |
| | | | | | AL109758, AC005274, AF002993, AL133163, Z82190, AF109907, AP000704, AL096701, AL031985, |
| | | | | | AC002554, AC004841, AF207550, AC004583, AL008710, AL121769, AC005412, AC004383, |
| | | | | | AC000003, AC006121, AC005218, AC007676, AC005740, AL035458, AC004890, AC006026, Z75890, |
| | | | | | AL034423, AL096703, AC005663, AL031281, AC005399, AC005664, Y18000, AC009247, AC006012, |
| | | | | | AC004448, AL009183, AL035398, AP000553, AC005726, AC009516, AC008372, AC006561, |
| | | | | | AL023281, AL030996, U91322, AL035422, AC006547, AC005666, AC006101, AC004645, AC006064, |
| | | | | | AC000075, AC000084, AL109809, Z93023, AC003689, AL133245, AC006004, AC005484, AC002310, |
| | | | | | AC005594, M13792, AC008154, AC005011, AC005913, AL021394, AL109628, AL080243, AC005591, |
| | | | | | AL031224, U85195, AC005225, AC002350, AF064863, AE000658, AF205588, AC000094, AL132641, |
| | | | | | Z68617, AC012627, AC005229, AC004668, AC000387, AC006251, AL117337, AL049843, AL049871, |
| | | | | | AC005206, AC016026, AC005529, Z97053, AL034430, AC000120, AC004611, AC006317, AC010077, |
| | | | | | AC002461, AF129756, AC005288, AC004983, AC005667, AL031589, AL031311, AL020997, U91326, |
| | | | | | AL049697, AF029308, AC013256, AC005358, AC009731, AC004084, AL020993, AB017602, |
| | | | | | AC005049, Z98946, AP000966, AL031680, AC005277, AG134471, AC002546, AC007066, AC002563, |
| | | | | | AL133448, AC004019, U95742, AL022163, AL035681, D88268, AC004797, AL049709, AL031663, |
| | | | | | AC005730, AC004477, AC007216, AF053356, AL034429, AL080317, AL022322, AC004167, |
| | | | | | AC007546, Z84467, AL031282, AC005516, AC007639, AC009248, AL031678, AC004242, AC005291, |
| | | | | | AP000359, AL033527, AC005514, Z97056, AC000381, AC007068, AC005901, Z95115, AL031651, |
| | | | | | AC007065, AC004771, AC008008, AL109623, AC005067, AL023580, AC004388, AC007298, |
| | | | | | AC004895, AC005488, AL022725, AL121658, AC004638, AC005800, AC008975, AC005971, |
| | | | | | AC005837, AL031283, AC006332, AP000085, AL096678, AC006515, AC005746, AP000959, |
| | | | | | AC004821, U80459, AC005988, AC007406, AC005362, AC007381, AC002089, AC003006, Z49155, |
| | | | | | AJ009610, AL021707, AC007388, AF111168, AP000008, AC007899, AC006236, AL049646, |
| | | | | | AL049776, AC004883, AC007774, AC007151, AC004707, AL049588, U62293, M63796, AC008545, |
| | | | | | AC007227, Z68273, AC018633, AC004796, AC004236, AC004706, AL021940, AL109653, AC007437, |
| | | | | | AC007845, Z77249, AC004858, AC006014, AC002470, AC002126, AP001060, Z95113, AC004812, |
| | | | | | AC006455, AC004526, and AC004882. |
| HLJDL84 | 172 | 782823 | 1-469 | 15-483 | A1751162, F13749, F29989, AW162288, AL135643, AI049722, C18763, AI598060, AI696793, T29180, |
| | | | | | AW406755, AI446474, AI365988, AA558298, AA501614, AW339687, AA132765, AA482810, |
| | | | | | AI284640, AI635272, AA563770, AI148245, H48546, AI357551, AA323085, AI299050, H65464, |
| | | | | | AA487542, AA148489, AW131034, AA936872, AA730782, H95681, AA579184, AI250019, AI370475, |
| | | | | | R82388, AA507282, AA533408, F17700, AI382614, AL037910, AA326410, AA229444, R92404, |
| | | | | | AA385100, AA843450, AL120579, A1800343, W45298, AA321719, AA557686, AI144055, AA847099, |
| | | | | | AA747480, AA099892, W45283, A1358229, AA113186, AW238127, AA831388, AL045077, |
| | | | | | AA644320, AI610644, AA577748, AW024017, AI908093, AA132833, R87547, AI859834, AA632960, |
| | | | | | AA365586, AI291317, AW270258, AA235575, AA578853, AA443390, AA601680, AA310879, |
| | | | | | AC002477, AC004216, AC009516, AC006270, AP000557, AC007390, AP000556, AP000552, |
| | | | | | AC007551, AC005755, Z83838, AC005484, AP000509, AL034420, AC004933, D84394, AL096701, |
| | | | | | AC005567, AC004887, AF196971, AC006509, AP000356, AL008719, AC004783, AC000015, |
| | | | | | AC005529, AC005007, Z98941, AL031662, AC012599, AR036572, U91328, AC005086, AC004253, |
| | | | | | AL117536, AL031650, AL035427, AC004797, AC006084, AL031584, AC005291, Z92546, L44140, |
| | | | | | AC005378, AL109798, AF00 1549, AL022476, AP000353, AC006597, AL031283, AL031680, |
| | | | | | AC005412, AC004819, Z95116, AC008033, AC005703, AL078639, AC005701, AP000961, AC004983, |
| | | | | | AC006130, AC004019, AL109627, AC005255, AC005913, AC002039, AC002350, Z84480, AC005399, |
| | | | | | AC002425, Y18000, AC004084, AC005060, U95742, AC006511, AC005874, AF134471, AC004882, |
| | | | | | AC007216, AC005740, AC006115, AC005954, AL034451, X55448, AL035587, AC008071, AF196779, |
| | | | | | AL034555, AL049869, AC002070, AL080243, AC004805, AC006312, AL031120, AC006207, |
| | | | | | AC002996, AL035683, AL031255, AP000096, AC002115, U07563, AP000350, AC002468, AC002426, |
| | | | | | Z83856, Z82214, AC006285, AC006241, AC004644, Z93244, AP000432, AP000240, AC005971, |
| | | | | | L35485, AC004534, AC009509, AC003964, AL024498, AP000055, AP000123, AP000170, AC005726, |
| | | | | | M17262, AC007792, AF146367, AL049780, AC006530, AC005562, AL049872, AC008372, AC007030, |
| | | | | | AC005229, AL031053, AP000500, AL031589, AC001643, AC006050, AF124523, AC006238, |
| | | | | | AL121825, AL035658, AL049776, AC005081, AF031078, AC004215, AF000573, AB000879, Z84467, |
| | | | | | AF030876, AC006044, AC004491, AC007845, AC007298, AL033527, AC004820, AP000114, |
| | | | | | AC006271, AC004832, AJ011713, AC002404, AL031778, AC004890, AC006111, AC003958, Z98884, |
| | | | | | AC005209, AL023803, AC005480, AL031848, U85195, AC016025, AC007237, AF165926, AC005694, |
| | | | | | U96629, Z75407, AC005520, AC004834, AC005159, AP000507, AC007386, AC005327, AC004510, |
| | | | | | Z85987, AC005988, AL121603, AC005764, AC005207, AC005368, AE000658, AC004453, AC007537, |
| | | | | | AC005154, AF011889, AL133396, AB000882, AC004921, AL121694, AC002418, AC005940, D83253, |
| | | | | | AC005057, AL133289, AL117339, AC005355, AC009784, AC016027, AL049588, AC016830, |
| | | | | | AL049757, AC005839, AP000030, AF053356, AC005785, AC007735, AC005527, AC006257, |
| | | | | | AL121769, AL022240, AC006088, AL031230, AC002420, AC000052, AL136295, AC000119, |
| | | | | | AC004815, AF047825, AC006544, Z97056, AC005808, AC005829, AL132994, AC005993, AC006064, |
| | | | | | AC007993, AC002492, AP000466, AC003667, AL049610, AC006076, AC005040, AL022578, and |
| | | | | | AC007934. |
| HLJDZ49 | 173 | 923476 | 1-422 | 15-436 | AA362688, AA362690, AA362689, T29199, AL044652, AI432644, AI623302, AI431312, AI432653, |
| | | | | | AI432654, AW081103, AI431347, AI431230, AI431328, AI431354, AI432655, AI431310, AI432677, |
| | | | | | AI431337, AW128900, AI431353, AI432661, AI492519, AI432675, AI432674, AI432676, AI432651, |
| | | | | | AI432647, AI431254, AI432650, AI431330, AI431248, AI432649, AI431243, AI432672, AI432665, |
| | | | | | AI431255, AI431307, AI431316, AI431346, AI431345, AI432662, AI431357, AI791349, AI431351, |
| | | | | | AI431241, AI432673, AI432658, AI431340,AI431238, AI432666, AW128846, AI432664, AI431247, |
| | | | | | AI432657, AI431235, AI492510, AI492520, AW128897, AI431231, AI432643, AI431308, AW128884, |
| | | | | | AI431257, AI431751, AI431323, AI431350, AI431318, AI492509, AI431321, AI431315, AI431246, |
| | | | | | AI432645, AW129223, AI431314, AL042729, AL042931, I66498, A49045, A94048, A94061, |
| | | | | | AR035224, I66495, I66494, E01324, I08638, I66497, I66496, I66486, I66487, I09252, I09251, I09270, |
| | | | | | I09268, I09269, I07209, I07249, AR068508, AR068510, AR067734, AR068509, A63954, I91969, |
| | | | | | A49701, A29109, A32111, AR068550, A23373, AR068551, A94046, A94054, I58322, I583323, A27169, |
| | | | | | A27170, A39929, A83151, AR067731, AR067732, AR038321, AR038307, I09267, Y17793, AR051528, |
| | | | | | AR051547, AR051537, AR051524, A42964, AF064854, AF019249, and AL133019. |
| HTRAC19 | 174 | 509114 | 1-380 | 15-394 | |
| HWKAB11 | 175 | 966529 | 1-458 | 15-472 | AA282419, AI347203, D87437, and Z99289. |
| HNLMB07 | 176 | 951944 | 1-344 | 15-358 | AA513899, N66187, and N99183. |
| HLJEB53 | 177 | 727924 | 1-679 | 15-693 | N66926, AI292170, N64431, AA704444, N64431, AA704444, N75955, H41215, AI051426, N63244, N69201, T99531, |
| | | | | | T97618, AI279207, H72612, R08835, and H61093. |
| HLJDZ06 | 178 | 934837 | 1-570 | 15-584 | AI638450. |
| HLJDU56 | 179 | 853274 | 1-610 | 15-624 | AI970788, AW118603, AI653980, AI884393, AI038559, AI803977, AA633580, AI299369, AI281374, |
| | | | | | AI377662, H02873, AI246272, AW058300, N64512, AA809261, AI355041, AA526520, H03768, |
| | | | | | N75621, AI702548, AI245763, N22380, D59329, AA452590, H50615, AA302791, AI216182, H50614, |
| | | | | | AI205785, N80300, and AA324459. |
| HLJDO65 | 180 | 747587 | 1-560 | 15-574 | AI200538, AI148143, AI699383, AI932366, AI423355, AA047736, AI243302, AA746185, AA234674, |
| | | | | | AA831124, AI359254, AI301539, AA235334, AA535117, AI702607, AA047685, and Z57189. |
| HLJDOS7 | 181 | 734445 | 1-351 | 15-365 | W46341, AA774530, and AA747697. |
| HLJDO10 | 182 | 856927 | 1-631 | 15-645 | |
| HLJDN60 | 183 | 740061 | 1-381 | 15-395 | R65885. |
| HLJBR43 | 184 | 948850 | 1-660 | 15-674 | AA398185, T78054, and T79888. |
| HLJBE22 | 185 | 674819 | 1-730 | 15-744 | AA429389, AA425128, AA777471, and |
| HLHTN82 | 186 | 780223 | 1-418 | 15-432 | H06034, and H00107. |
| HLHTJ69 | 187 | 753728 | 1-334 | 15-348 | T53089. |
| HLHTG46 | 188 | 526232 | 1-246 | 15-260 | |
| HLHTF36 | 189 | 526250 | 1-289 | 15-303 | |
| HLHTD25 | 190 | 526239 | 1-486 | 15-500 | AA235119, H66279, AA235090, H61590, AI937478, H67984, AI869636, AC000039, and AL022326. |
| HLHSW56 | 191 | 507494 | 1-530 | 15-544 | AI023320, AA777797, AA705187, AA814105, AI417590, AI684797, AW087410, N63886, AA677787. |
| | | | | | Z39754, AI802353, AA913611, R46560, AI537562, and N68764. |
| HLHSI21 | 192 | 671463 | 1-413 | 15-427 | Z41535, T27089, and F03042. |
| HLHQQ78 | 193 | 858508 | 1-556 | 15-570 | H09370, H09371, AA133345, D59238, AA129731, N34243, H48651, AW302122, N75681, L25244, |
| | | | | | AA091691, W04456, AA235185, AA446685, AA370891, AA370711, T86637, W07565, N83694, |
| | | | | | W19152, R12046, H08386, F11627, and F11617. |
| HLHGH69 | 194 | 757636 | 1-489 | 15-503 | W20310. |
| HLHGH68 | 195 | 753110 | 1-232 | 15-246 | AA426180, AI142137, AI769274, AI080000, AI079974, AI126187, AI633552, and AF028233. |
| HLHGD64 | 196 | 746698 | 1-280 | 15-294 | AA088817, R47274, and AI732404. |
| HLHFZ58 | 197 | 735318 | 1-656 | 15-670 | AA429235, AA425058, Z41411, AA932180, and AL008726. |
| HLHFU46 | 198 | 717922 | 1-499 | 15-513 | T79225, R06197, T66934, AI929754, and AI816509, |
| HLHFS01 | 199 | 916779 | 1-365 | 15-379 | H89902. |
| HLHFM25 | 200 | 840141 | 1-490 | 15-504 | AA489407. |
| HLHFF41 | 201 | 712427 | 1-576 | 15-590 | AA203582, AA203576, and AC005483. |
| HLHFC11 | 202 | 967254 | 1-454 | 15-468 | AI332455, AW135717, and Z98257. |
| HLHEY63 | 203 | 668174 | 1-44 | 15-58 | AI095709, and AA977157. |
| HLHEY62 | 204 | 576148 | 1-149 | 15-163 | |
| HLHEX07 | 205 | 953548 | 1-544 | 15-558 | AI341382, AW445003, AW002566, AI696024, AI961146, AI337126, AI992332, and AA287273. |
| HLHET59 | 206 | 857001 | 1-400 | 15-414 | AA827970, AA828964, AA936399, AA837664, and U89337. |
| HLHEP07 | 207 | 953542 | 1-895 | 15-909 | AI768408, AI493134, AI383985, AI498457, AA393768, AI498691, AI580267, AI783624, D79813, |
| | | | | | AI126032, AI631316, H19127, AI167688, AI433049, R54363, AW450411, AA806976, AW137647, |
| | | | | | AI282343, AI174428, AA962712, R42341, AA873009, AA903795, AI025701, AA629381, AA992857, |
| | | | | | AA625577, AW297232, AW197700, AI924284, AI888781, AI266037, AA507063, W61287, AI144360, |
| | | | | | AI678538, N30662, AA291159, AA053333, AI335923, AA148525, AA815167, AA156780, AI097204, |
| | | | | | AI927804, AI985915, AW073743, Z38146, AW150542, AI810316, AW090630, AA029269, AA027835, |
| | | | | | AI708689, AI796097, AI765292, AI370753, D63056, AW301267, D63083, R72609, D79598, AI925336, |
| | | | | | AL037368, D62478, AA370478, D62915, D62826, D62660, and AC003098. |
| HLHEP02 | 208 | 920385 | 1-926 | 15-940 | AW024890, AI913402, W69464, N35803, W69548, AW103818, W81477, AA574091, W81437, |
| | | | | | AW026869, 1196311, and AW051935. |
| HLHEO70 | 209 | 576526 | 1-167 | 15-181 | |
| HLHEN10 | 210 | 964868 | 1-680 | 15-694 | AI765911. |
| HLHEG22 | 211 | 674764 | 1-521 | 15-535 | T97486, H87840, AI912239, Z57026, Z57025, and Z58693. |
| HLHDS57 | 212 | 735102 | 1-798 | 15-812 | |
| HLHDP11 | 213 | 967751 | 1-351 | 15-365 | N53315, and N51164. |
| HLHDO38 | 214 | 709147 | 1-494 | 15-508 | AA174136. |
| HLHDM69 | 215 | 529681 | 1-451 | 15-465 | |
| HLHDM43 | 216 | 529683 | 1-225 | 15-239 | AL133077, and AB012723. |
| HLHDM08 | 217 | 960214 | 1-127 | 15-141 | |
| HLHDL25 | 218 | 857012 | 1-326 | 15-340 | AA338474, AA342029, M77888, AA287823, N90244, AI567676, AI246796, AI278972, AI049999, |
| | | | | | AA605243, AA747375, AA595661, AI572680, AI312614, AI567401, AA636077, AA779599, R33053, |
| | | | | | N53783, AA493245, AI298710, AI221027, AI754257, AI745666, AI031759, AA601376, AA152398, |
| | | | | | AA227167, AA347232, AI300608, AI475465, H79004, AA525818, AA362670, AA610789, F01666, |
| | | | | | Z30294, F01532, AA648605, AA503018, AI926093, AI889177, AA199578, F00688, AL080243, |
| | | | | | AL139054, AP000356, AL009181, AC006121, AC002310, AC005971, AF047825, AC006344, |
| | | | | | AC005527, AL033517, AC000379, AC005377, Z95116, Z78021, AC004408, AC002312, AC005529, |
| | | | | | AF207550, Z95327, AL132777, Z93241, AC005484, AC004019, AC006057, AC006165, AC004263, |
| | | | | | AL031311, Z93023, Z97989, AC002492, AC004491, U47924, AC000081, AP000557, Z86090, |
| | | | | | AC006441, AC006511, AC006312, AL022334, AP000692, AC004583, Z97876, AC005071, AC004771, |
| | | | | | AL022323, Z98051, AB023051, AL022316, AL022329, AC003043, AC005280, AL035086, AL035249, |
| | | | | | AL133246, AC005519, AC005736, AL0222237, AC009247, AP000210, AP000132, AC006014, Z83840, |
| | | | | | AP000689, AD000092, AL049872, AL121658, AC005081, AC005694, AC005412, AP000359, |
| | | | | | AL050348, AC004813, AL031767, AC000353, AC000134, AC005225, AC005229, AC003041, |
| | | | | | AC005914, AC007216, AC004526, AL121653, AL049869, AC010077, AL031650, AC007542, |
| | | | | | AC002996, AC006947, AC006120, AC006449, AF003626, AF129756, AC002565, AB003151, |
| | | | | | AC003108, AC006071, AC002991, AF196969, AP000512, AL096701, AC005370, AC005730, |
| | | | | | AB006445, AC000159, AC005015, AC005778, AC004876, AF165926, AC004000, AL035587, |
| | | | | | AP000501, AL049576, AC005180, AC005920, AC002091, AF109907, Z98044, AP000116, AC004837, |
| | | | | | AL023803, AL031427, AC007388, L78810, AP000509, AC007051, AC006285, AP000050, AL035443, |
| | | | | | AP0005SS, AL034553, AC004805, AC007421, Z83822, AL136295, AC007919, AL109798, AL049636, |
| | | | | | AC002394, AL031602, AL022721, M63796, AC007308, AL049780, AC005177, U52112, AL031281, |
| | | | | | AP000556, AC007227, AC002301, AC003101, Z98742, AF001548, AC005632, AC005089, AC005913, |
| | | | | | AC005581, AL031296, AP000117, AC005841, AL109952, AP000553, AL049198, AL033527, |
| | | | | | AP000152, AC004447, AL021154, AC005776, Z99570, AC006505, AC003070, AP000010, AC000070, |
| | | | | | AC002347, AL133448, Z98200, AL079299, AC006211, AC007564, AL109623, AL049745, AP000558, |
| | | | | | AL020997, AC000052, Z83819, AC004645, AL049830, AC005399, Z98884, Z93930, AC004890, |
| | | | | | Z83843, AC007263, AC004832, AC004662, AC007666, AC002115, AC005082, AJ246003, AL021394, |
| | | | | | AC006581, AC007151, AC006111, AB023049, Z99716, AL135745, AC006101, AC002314, AC007226, |
| | | | | | Z84466, AC007229, AC005566, AF134726, AL022165, AF111168, AC005696, AC004254, AC005088, |
| | | | | | Z93244, AL109628, AC005839, Z81364, AC005562, AC002425, AL121748, Ac006132, AL109627, |
| | | | | | AL121754, AP000504, D87675, AC004887, AL022318, U91323, AL034429, and AL049697. |
| HLHDL15 | 219 | 529685 | 1-388 | 15-402 | |
| HLHDD37 | 220 | 529187 | 1-308 | 15-322 | AA953042, and AI719985. |
| HLHDD13 | 221 | 529190 | 1-603 | 15-617 | AAI71657, AAI69124, and AL031668. |
| HLHCU54 | 222 | 731020 | 1-342 | 15-356 | |
| HLHCT68 | 223 | 764745 | 1-425 | 15-439 | R91150, H67895, AI205078, Z25012, C05212, Z30134, and AA194359. |
| HLHCN77 | 224 | 530617 | 1-238 | 15-252 | |
| HLHCN64 | 225 | 530621 | 1-257 | 15-271 | |
| HLHCN05 | 226 | 932023 | 1-629 | 15-643 | H03602, and AC000047. |
| HLHCN02 | 227 | 921086 | 1-767 | 15-781 | AI655832, and AI221888. |
| HLHCL93 | 228 | 530624 | 1-198 | 15-212 | AI660071. |
| HLHCL89 | 229 | 530625 | 1-168 | 15-182 | |
| HLHCL83 | 230 | 530634 | 1-392 | 15-406 | T56937, T67226, T95451, and AB011117. |
| HLHCL75 | 231 | 526573 | 1-302 | 15-316 | |
| HLHCL50 | 232 | 857021 | 1-307 | 15-321 | AW450839. |
| HLHCK32 | 233 | 530631 | 1-156 | 15-170 | AI963785. |
| HLHCD27 | 234 | 521947 | 1-201 | 15-215 | AC002401. |
| HLHCC63 | 235 | 668121 | 1-541 | 15-555 | AW135646, AI262085, AI694469, AW138585, AI866241, AL040188, A1928103, R55329, R37443, |
| | | | | | AA77 1873, AI159977, AW439672, AA035665, AW003564, AA723341, AI193146, AA570427, |
| | | | | | AI918 167, AI08 1233, AA4 16970, AW302588, AI598198, AW242455, AI694864, AI693098, AI143835, |
| | | | | | AW071797, AW044126, AI761050, AI245413, AA040289, AI923642, AI703268, AI912581, |
| | | | | | AA576657, AI271710, AA905439, AI833270, AW102697, AI819714, AI038988, AI262739, |
| | | | | | AW193332, AI291960, AI52 1771, AI803855, AI187133, AI669967, Z41021, W23593, W74457, |
| | | | | | AI751193, AI692340, H46004, N34762, R48579, Z68282, and Z49250. |
| HLHCB07 | 236 | 954272 | 1-575 | 15-589 | T71087, and AL033377. |
| HLHBF23 | 237 | 908589 | 1-478 | 15-492 | AA813323, AI637736, AA359799, AA301602, and AC002519. |
| HLHBA66 | 238 | 909927 | 1-406 | 15-420 | AA359650, T81618, AA228091, and AW303369. |
| HLHAR74 | 239 | 766008 | 1-591 | 15-605 | T75536, and AA359021. |
| HLHAR03 | 240 | 960953 | 1-562 | 15-576 | W26081,AA359219, and AC007040. |
| HLHAM01 | 241 | 961084 | 1-398 | 15-412 | AA358701, AA402348, AA298418, AF146367, AF124523, and AF118808. |
| HLHAD02 | 242 | 921354 | 1-980 | 15-994 | AI376957, AA426022, AI187269, AA234540, AA622043, AA568238, AA428117, AA622154, |
| | | | | | AI445977, P26271, AA358883, AI420538, AU744285, and R25445. |
| HLHAA95 | 243 | 575217 | 1-427 | 15-441 | H48278, AA358746, AA630086, and AA632 |
| HLHAAI4 | 244 | 660854 | 1-150 | 15-164 | AA358672, AA358673, and AL136504. |
| HLFBN59 | 245 | 503815 | 1-239 | 15-253 | AA828581, AI474751, AA358569, and T62634. |
| HLFBM24 | 246 | 608745 | 1-366 | 15-380 | AA358503, AA358502, AA226975, AA226973, AA333275, AA092292, AA385305, AA373824, |
| | | | | | H87081, AAI80952, AA463323, and W56381. |
| HLFBM20 | 247 | 503816 | 1-318 | 15-332 | AA358499, AA358498, AC005089, AC006430, AC007216, AL133163, U95742, AL096775, AC005225, |
| | | | | | and AC005399. |
| HLFBJ41 | 248 | 503818 | 1-353 | 15-367 | AA358429, AA358430, T86184, H88412, H88353, C15076, D59467, D59787, D80164, D58283, |
| | | | | | D80043, D57483, D80188, D81030, D80253, D80022, D59859, D80166, D51423, D59619, D80210, |
| | | | | | D51799, D80240, D80366, D50979, D80212, D80391, D80195, D80219, D80227, D59275, D59610, |
| | | | | | D59502, D80196, D59889, D59927, D80024, D80269, D80038, D80193, D50995, D80241, C14331, |
| | | | | | C14389, D80378, C14429, D52291, D80522, AA305409, C75259, D80045, D51q060, T03269, C14014, |
| | | | | | AW378532, C14298, D80064, D59695, D80134, AW178893, D81026, D58253, F13647, D51022, |
| | | | | | D80251, AW369651, D51250, AW179328, D80248, AW352158, Z21582, AW177440, AA305578, |
| | | | | | AW178775, AA514188, AI557751, AW178762, AA514186, C14407, T11417, AI910186, D80133, |
| | | | | | AI905856, AW36081 1, AW378540, AW177501, AW177511, D51097, AW375405, C05695, |
| | | | | | AW360834, D80268, AW3521 17, AA285331, D80132, AW176467, AW377671, AW366296, |
| | | | | | AW360844, AW375406, AW360817, AW378534, AW179332, AW377672, AW179023, AW178905, |
| | | | | | D80439, D80247, D80258, D59373, D80302,AW352171, AW377676, AW178906, AW352170, |
| | | | | | AW177731, AW178907, AW179019, AW179024, AW177505, AW179220, AW352174, AW179020, |
| | | | | | AW360841, AW178909, AW177456, AW179329, AW178980, AW177733, AW378528, AW178908, |
| | | | | | AW178754, AW179018, AI557774, D51759, AW179004, AW367967, D80157, AW179012, |
| | | | | | AW178914, D80014, AW378525, D59627, D51103, and AC008014. |
| HLFBI37 | 249 | 503820 | 1-193 | 15-207 | AA358396, and AA358395. |
| HLFBH89 | 250 | 503823 | 1-290 | 15-304 | AI342333, AA358035, and AA358034. |
| HLFBH68 | 251 | 753855 | 1-359 | 15-373 | AA358331, AA507623, AI538404, AI572680, AA358330, AI174489, AA084148, AA610644, |
| | | | | | AW239465, AW021674, AA362670, AA126969, AI905408, AI370470, AA526643, AL042667, |
| | | | | | AL042670, M78137, M77964, AA846014, AW192930, AL138262, AI702049, AI445699, AA300049, |
| | | | | | AW265468, AI791408, AI791720, AA640104, AC005031, AC004999, AC006511, AL133448, |
| | | | | | AD000671, AF075069, AC005531, AC004263, AC006077, AC005303, AL022336, AL079342, |
| | | | | | AC004765, AC005933, AC005527, AL050318, AC005730, Z93848, AC005808, L78833, AJ246003, |
| | | | | | AC007868, AC005300, AC004703, AL031662, AC005529, AC007421, AC005837, AC005839, |
| | | | | | AL132826, AC006360, AC005231, AC004650, AC000353, AC007066, AC005200, AL031680, Z95116, |
| | | | | | AC012085, AC002504, AL135783, AC005089, AC007686, AC005519, AL031295, AL008718, |
| | | | | | AC004686, AC006480, AC004897, AL035587, AB023048, AB023051, AC002492, AC004890, |
| | | | | | AP000512, AF001549, AC005046, AC000379, AC006581, AL031587, AC003043, AC005399, |
| | | | | | AC004972, AD000092, AC002553, AP000469, AL133163, AC004019, AC005004, AL008716, |
| | | | | | AC001231, AL035445, AL049776, AC005694, AC003098, U80017, Z15025, AL117330, AC006162, |
| | | | | | AC002477, Z84474, AF207550, AD000812, AC005913, AC002312, AC007536, AC002996, Z46936, |
| | | | | | AC002126, AL096712, AL121655, AC005412, Ac007283, AL020997, AC002364, AC005015, |
| | | | | | AL080243, AL022165, Z95327, AL049694, AC004053, AC006315, AL049743, Ac004000, Z82206, |
| | | | | | Z98949, AL021918, AC005606, AL035455, AC005325, AL133246, AL020995, AC00159, AC002310, |
| | | | | | AF015416, Z78021, AC004381, AL049569, AC003041, AC007227, AC002347, AB000565, AL034548, |
| | | | | | AC005695, AC005280, AL031005, AF196972, AL031427, AC005905, AC006006, AC004448, |
| | | | | | AC007731, AL031003, AC006241, AC00550, Z95114, AC003037, AL031846, Z83844, AC003684, |
| | | | | | AL133245, Z85986, AC004934, AP000030, AC005393, Z93241, AC002468, AF045542, U95739, |
| | | | | | Y18000, AL035413, AC005696, AJ229041, AC004526, AC004834, AL031432, AC005535, Z95704, |
| | | | | | AC002991, AF023268, AB023061, AF003528, AC005914, AC004099, AC000388, AC005180, Z98044, |
| | | | | | and AC005828. |
| HLFBH56 | 252 | 522229 | 1-553 | 15-567 | AA358318, AA358317, H81732, AW316599, AL121287, M78032, AA558905, AA828840, AA601320, |
| | | | | | AA525331, AA683063, T98915, AI345628, AA582060, AA491889, H67251, AA641112, AA788592, |
| | | | | | H70461, AA524616, AW023975, AL109985, AL096701, AL078639, AC007429, AC000092, |
| | | | | | AC005207, AC004477, AP000501, AL049589, AL022241, Z84477, AP000011, AP000153, AC006531, |
| | | | | | AL008712, L31948, AC004699, AL132987, AC003663, AP000952, AC004925, U73644, AC08009, |
| | | | | | AC013417, AL109952, AC008101, AC003029, AC005921, AC009946, AC008079, AC016027, |
| | | | | | AC016830, AL034548, AL109984, AC007879, AC007014, AC004196, AC005697, AC004491, |
| | | | | | AC005189, AC007656, AC007637, AC006001, AP000033, AC005726, M63543, M63544, AC005200, |
| | | | | | AC005480, AC004150, AC007239, AC004674, AL121769, AC004408, AC004876, AL031681, |
| | | | | | AC004495, AL109623, AL035086, AD000864, AL049780, AC007055, Z98200, AC005856, AC004081, |
| | | | | | AC008372, U91323, AP000555, AC005222, AC005752, AC005300, AC002477, AC004671, AC007707, |
| | | | | | AC006372, AC006946, U62293, AC003682, AC004476, AP00510, AF001548, AC005225, AB023048, |
| | | | | | AL034384, AC007406, AC005057, AC004983, AL021407, AP000102, AC005839, AC004241, |
| | | | | | AC005971, AC005823, AL031905, AC004991, AL035587, AC004999, U80017, AL008629, AL022721, |
| | | | | | AC006530, U63721, Z84466, AL032821, AL022316, AC005011, U95742, AC007216, AL035419, |
| | | | | | Z98750, AL078581, AL135783, AC006390, AP000117, AC007358, Z69721, AC007226, AC007057, |
| | | | | | Z83840, Z95331, AC003071, AP000699, AC005209, AL035659, AF111168, AC004985, AC003107, |
| | | | | | AC018633, AL080241, AC002126, AL049766, AL031666, AL034402, AC003689, AC004967, |
| | | | | | AL009179, AC000035, AL049743, AL049631, AC004451, AC005233, AF001550, AC007382, |
| | | | | | AC002551, Z84484, AP000557, AC004682, AL022159, AC006475, AC006347, Z93930, AC003025, |
| | | | | | and AL021878. |
| HLFBH31 | 253 | 693525 | 1-520 | 15-534 | AA358302, AA069526, AA069525, AW162288, F13749, AI431434, AA582554, AI434686, AI537538, |
| | | | | | AI926233, AA668291, AI751162, F35097, R83708, AA744036, AA298780, A1360690, T07013, |
| | | | | | H54292, AA381754, AA931162, AAI21777, AAI817658, AI689019, AA878058, AA804866, AI004591, |
| | | | | | AI305258, AA078084, AA085863, AA644320, AI598060, AI051037, AI674840, AI569510, AW058430, |
| | | | | | F33138, AI285521, AA564587, AI889612, AA601986, H69523, R62150, AI421257, AA558366, |
| | | | | | AA652868, AW068786, AI932902, H97741, AA555165, AI888468, AI623423, AA573213, AA191418, |
| | | | | | AI076236, AA302963, F17416, Z98051, AF196969, AF134726, AC005323, AL020995, AL035530, |
| | | | | | U80017, AC004967, AC004905, AC004910, U96629, AL031587, AC007283, AC005962, AL050332, |
| | | | | | AC003010, S42653, AC007917, AL096712, AC006511, AC005071, AC005722, AL133448, AL022313, |
| | | | | | AL023883, AL031905, AC003101, AC005529, AL022327, AC08372, M87909, AL109837, AL035541, |
| | | | | | AC005225, AC006212, U91321, AC002543, AC004134, Z84467, AC009247, AL031311, AP000855, |
| | | | | | AC007773, AC004231, AC004150, AC002312, AC007011, AC004019, AC005874, AF134471, |
| | | | | | AL049872, AC004662, AC007285, AC005230, AC004408, AL035461, AC003109, AC005207, |
| | | | | | AC005345, AC005839, AC005066, AP000502, AC006023, AC004955, AP000114, AC005046, Z98950, |
| | | | | | AC005772, AC007546, AC005261, AL133245, AC005277, AC004456, AC007566, AC005089, |
| | | | | | AC002492, AL049780, AC005288, AL022476, AC007207, AL121657, Y10196, AL022318, Z82206, |
| | | | | | AB0031SI, AC005670, AL024509, AL078581, AC006285, AC005486, AB020863, AC005527, |
| | | | | | AC004242, AL031662, AL031432, AC010206, AL035685, AC007421, AL049776, AC005152, |
| | | | | | AL022323, AL049636, AC005746, AC005755, AL049831, Z83822, AC006536, AL021154, AF111167, |
| | | | | | AL031053, AL023803, AF031078, AC004894, AC007363, AL024498, AF030876, AC002994, |
| | | | | | AP000557, AC002527, AL049869, AC004893,AC004976, AL034548, AP000090, AL033525, |
| | | | | | AC000068, AL031281, AC006312, AF108083, AL034420, AP000354, AC008585, AC005224, |
| | | | | | AC005003, AC005332, AL031595, AC007036, AC005899, AF165926, AL035420, AL080242, |
| | | | | | AL078471, AC005274, AL121653, AC006211, AL022171, AP000501, AC004854, Z97353, AP000498, |
| | | | | | AL035089, AL022320, AL078476, AP000564, AC002316, Z98044, AC004841, AC005696, AC011311, |
| | | | | | AC006958, AC00S300, AC005484, AC004230, AL133353, AC002425, AC002470, AC006057, Z99756, |
| | | | | | Z98884, AC008038, AP000959, AC005191, AC004099, AC04851, AC007537, AC004655, AP000512, |
| | | | | | AP000212, AP000134, AL021877, AC005233, AL117536, AL021397, D87675, AC003041, AC005244, |
| | | | | | AL009181, AC003695, AC005358, AC005387, Z84469, AP000248, AC002365, Z93244, L35681, |
| | | | | | AC007021, AC006455, AC007358, AC005231, AC002480, Z97054, AC004966, AL096773, AC006254, |
| | | | | | AC005031, AC000025, AL049766, AP000111, AC004895, AL135783, AC005379, AC006930, |
| | | | | | AP000251, AC006124, AB026898, AC009516, M87914, AF001549, AC002301, AC005988, AL022726, |
| | | | | | AL031224, Z83826, AL031295, AC005747, AP000696, AL139054, Z93930, AC007226, AC007707, |
| | | | | | AC008044, AL035071, AC005086, Z86061, AL080243, AC002091, AC05944, AL050308, AC005620, |
| | | | | | and AC008040. |
| HLFBH20 | 254 | 504051 | 1-371 | 15-385 | AA358266, AA358265, and AI309891. |
| HLFBG45 | 255 | 716946 | 1-156 | 15-170 | W38990, and AA358248. |
| HLFBG21 | 256 | 504052 | 1-190 | 15-204 | AA358236, AA358237, AI207699, AC000353, AC004382, AL021154, and AC004216. |
| HLFBE01 | 257 | 961087 | 1-157 | 15-171 | AA358049, and AA358048. |
| HLFBD79 | 258 | 509799 | 1-469 | 15-483 | R67370, AA357872, and AA357873. |
| HLFBD39 | 259 | 792908 | 1-267 | 15-281 | AA358067, AA358066, R24129, AW251088, AI635192, Z39055, AA628069, AI589442, |
| | | | | | AW300643, AAI59597, AA621653, H28599, AA062716, AA564554, AI039862, AA062750, R72095, |
| | | | | | H84657, AI750836, and H85192. |
| HLFBD23 | 260 | 509802 | 1-394 | 15-408 | AI419953, AA699642, AI935427, AI866766, AA702925, AA358054, AA358053, AI457813, |
| | | | | | AA830102, H69413, H69440, AW340795, Al120745, AC007546, and AF064604. |
| HLFBD22 | 261 | 678664 | 1-383 | 15-397 | AA358031, AA358052, C14014, H67854, N66429, AA809122, H67866, AI868365, AA312303, |
| | | | | | AI355246, AI270486, AA814510, AC007384, AC002430, AC005065, AC005067, Z98044, AL031005, |
| | | | | | AL031311, AC004967, AL133233, AC006571, AF001550, AC007842, AP000691, AP000553, |
| | | | | | AC006071, AC005730, AC009516, AL031295, AP000557, AC003684, AF117829, AC007216, |
| | | | | | AC004943, AC004832, U85195, AC008372, AC005274, AE000658, D88268, AL139054, AL110502, |
| | | | | | AP000556, AC005409, AC007151, AC004882, U95742, AL121595, AC005815, L78810, AL133163, |
| | | | | | AC002059, AC006253, U95739, AC005874, AF134471, AC009743, AL031685, AC005740, AC003991, |
| | | | | | AC004999, AL031368, AC005043, and AC005387. |
| HLFBC56 | 262 | 504068 | 1-379 | 15-393 | AI392921, AI765784, AA357999, AA005153, AA358000, AA843633, AA679631, and AJ001306. |
| HLFBC39 | 263 | 504073 | 1-301 | 15-315 | AA357984, AA663263, AA357985, AC005012, AF001548, AC005952, Z85987, AC005620, |
| | | | | | AC005740, AP000SS6, AC005529, AC005695, AC007151, AP000552, AP000557, AC004851, |
| | | | | | AC002045, AC007014, AC009516, AC00552, AP000557, AC004851, |
| | | | | | AC007229, Z99774, AC004032, AC007308, and AC004883. |
| HLFBC36 | 264 | 708000 | 1-874 | 15-888 | AA001249, N70261, AI023652, W04197, AA002203, AA357981, AA357980, and AC008165. |
| HLFBC34 | 265 | 706197 | 1-392 | 15-406 | AA357978, AA357979, AI362552, AI635609, AA988610, AI754170, AI859438, AI536834, AW069412, |
| | | | | | AA742815, AA864426, AA515351, AA076418, AI732786, AW069769, AI628859, AI291439, |
| | | | | | AA599199, AI537995, AI536858, AI130709, AI431513, F30158, N94342, AA156147, AI869786, |
| | | | | | AI889579, AW190484, AW272640, AI814682, AW148775, AA736488, N29936, AI889696, AA225795, |
| | | | | | AW089016, AW341882, AA053463, AA349937, AW083934, AI687343, AI268019, AA904211, |
| | | | | | AI811846, AI471455, AI587349, AW166611, AI244985, AA601230, AW073934, H57988, AW242031, |
| | | | | | AA015934, AW272740, AW089950, AL120282, AI754293, N66684, AI499954, AI292236, AA550989, |
| | | | | | AA489240, H85358, AA302682, AA566084, AI223968, AI123488, AA569494, AI492579, AI679045, |
| | | | | | AA501867, AA720582, AA568314, AI141130, AI310992, AI300818, AW419389, AL022336, |
| | | | | | AL109827, AL050318, AF121781, AL021391, I34294, AL031680, AL024507, AC007226, AL096701, |
| | | | | | Z83840, AL022322, AC005746, AC002472, AC007277, AC005212, U73637, AC005041, AC005102, |
| | | | | | AC004655, AC005914, AF124523, AL109963, AC010077, AF015416, AP000692, AC008041, Z93023, |
| | | | | | AL050308, AP000355, AF001548, AC005081, U82828, AL049588, AC005280, AP000557, AF196969, |
| | | | | | AC005228, AC006160, AC006241, AC002558, AC005829, AL021393, AL139054, AP000305, Z93017, |
| | | | | | AL049759, AL023581, AF118808, AD000092, AC004858, Z83844, AC004150, AP000047, AC006254, |
| | | | | | AC005972, AL049766, AC005940, AL022069, AC003030, AC007225, AP000115, AC009501, |
| | | | | | AC004854, AL049776, AC004032, AC005808, AC005332, AL034555, AC005037, AL022330, |
| | | | | | AC005755, AL023656, AC005412, AJ006216, AL035587, AC006115, AL022334, AC006323, U63721, |
| | | | | | AC008101, AL035420, AC003083, AL035693, AC007546, AC009516, AF196779, AP000555, |
| | | | | | AC004087, AF045555, AC016830, AC002310, AC006213, AC002365, AC005562, AC005015, |
| | | | | | AF124730, AC002073, AP000697, AF053356, AB023049, AC004843, AC011331, AC006538, |
| | | | | | AC007066, AC002492, AC009275, AC005324, AL009031, AF207550, AC007842, AC005777, Z98257, |
| | | | | | Z98946, AC006953, AC005003, AL109758, AC005089, AC005386, AL035659, AC007386, AC004491, |
| | | | | | AC005911, AL109628, AC002996, AC004605, AC002470, AP000510, AC002350, AL109798, |
| | | | | | AL080243, Y18000, AC004841, AC019014, AC004887, AC004813, AC006449, AC006001, AC004797, |
| | | | | | AC006251, AL022320, Z98742, AL049569, Z49235, AP000553, AC006126, AF109907, AL008730, |
| | | | | | AC004832, AL022316, AP000696, Z83845, Z99716, AF111169, Z93020, AL121653, AC000003, |
| | | | | | D28126, AC003041, AC006146, U78027, AF015262, AC007057, AL022238, AC005913, AC002115, |
| | | | | | AC002984, AL121603, AP000036, AC005095, AC007308, AJ229043, AL035422, AL049636, Z98941, |
| | | | | | AL008726, AC007486, AC004929, AL031274, AC004890, AC002369, AL117329, AL024498, |
| | | | | | AL078581, AC005667, AC005225, AC004920, AC006205, AC005678, AC005519, AC005231, |
| | | | | | AL049874, AC007542, AC000025, AC004685, AC003098, AC005527, AL121652, Z83826, AL035415, |
| | | | | | Z99916, AL079342, AC004893, AC008045, AC002316, AC004228, AL021977, AP000356, AC007686, |
| | | | | | AC012083, AL031120, AC004638, AC007059, AC002107, AC002477, AC004477, AL033517, |
| | | | | | AC004921, AL031719, AL035249, AC002326, AB001523, AC000073, AC002395, AB020863, |
| | | | | | AC004883, AC002126, AC005803, U91326, AF020503, AP000065, AC006312, AL031228, AL035683, |
| | | | | | AC004644, AC002985, AP000501, AL031846, AL096775, U95742, AF015164, AC004662, AC007216, |
| | | | | | X64467, AC005189, AC005018, AL049843, and AC002059. |
| HLFBC21 | 266 | 504070 | 1-246 | 15-260 | AA357965, and R16484. |
| HLFBA62 | 267 | 504074 | 1-352 | 15-366 | AA357918, AA089516, AA357917, and AC007276. |
| HLFAA06 | 268 | 960815 | 1-600 | 15-614 | AI333640, H89317, H89316, AA357857, and N68037. |
| HLPAP03 | 269 | 922537 | 1-546 | 15-560 | AW007737, AI984777, AI042490, AW028197, AW016544, AA644373, AF123655, AF123657, |
| | | | | | AF123658, AF123656, AF123659, AF123653, and AF123654. |
| HIPAH86 | 270 | 886842 | 1-636 | 15-650 | AI870525, AA010252, AA375300, Z99396, AL036418, AL038837, AL037051, AL036725, AW392670, |
| | | | | | AA631969, AL036858, AL039074, AL036924, AW372827, AW384394, AL038509, AL039564, |
| | | | | | AL039085, AW363220, AL119497, AL119483, AL039156, AL039108, AL039109, AL039128, |
| | | | | | AL037639, AL119319, AL119324, AL119457, AL119355, AL119443, AL037094, AL119484, |
| | | | | | AL039659, U46349, AL119363, AL119391, AL036190, AL036196, U46350, AL119522, AL037085, |
| | | | | | U46341, U46351, AL119341, AL119335, AL038531, AL037526, AL119444, AL038520, AL036767, |
| | | | | | AL119396, AL037082, AL037205, AL039386, AL119496, AL036268, AL119418, AL039625, |
| | | | | | AL039648, AL036238, AL045337, AL037077, AL042909, AL038447, A:039678, AL039629, |
| | | | | | AL134538, AL037615, AL038851, AL039423, AL134533, AL0377027, AL036998, AL036733, |
| | | | | | AI142137, AL037178, AL036719, AL036774, AL039410, AL036679, AL037021, AL036765, |
| | | | | | AL036191, AL036886, AL036158, AL036999, AL036836, AR060234, Ar066494, A81671, AR023813, |
| | | | | | AR064707, AR069079, and AB026436. |
| HIPAA05 | 271 | 930848 | 1-383 | 15-397 | AA700039, AI760265, AA633932, AA465689, AW074839, AC006512, U47924, AC004084, Z49918, |
| | | | | | Z82172, AC004967, AC007207, AC008009, AC004707, AL050327, and AC004883. |
| HIDAC10 | 272 | 970518 | 1-622 | 15-636 | R66652. |
| HIDAF76 | 273 | 857563 | 1-870 | 15-884 | AW450198, AI696229, AA233486, and AA169781. |
| HIDAE12 | 274 | 968936 | 1-763 | 15-777 | AA904211, H07953, T74524, AI061313, AA640430, AA483606, AI380617, AA570740, AA523695, |
| | | | | | AA640410, AAI69245, AA704393, AA535216, AA284247, AI609972, AL042373, AW023111, |
| | | | | | AA568204, AI687343, AA449997, AW270270, AI310464, AW303196, AW274349, AI275982, |
| | | | | | AI612142, AI279417, AI755214, AI270177, AL046519, AA524616, AI358384, AW301350, AI754567, |
| | | | | | AI754 105, AA501461, AW277 174, AA572813, AI962030, AW328331, AI610941, AI306232, |
| | | | | | AI25 1576, AI912401, AW270768, AI246796, AA630854, AI583466, AI583252, AI017251, AA515138, |
| | | | | | AW265688, AA526099, AI291037, AI859438, AI669421, AA297666, AI148277, AW270385, |
| | | | | | AW271917, AI053784, AA737309, AL079734, AI755202, AA513551, AI066646, AA515723, |
| | | | | | AI445224, AA397389, AI446259, AI884383, AW020088, AW237905, AW162489, AA825827, |
| | | | | | AI889579, AW274191, AI206841, AW238253, AI362415, AA832016, AA654874, AA829036, |
| | | | | | AI753365, AI792521, AI583106, AA515907, AI096738, AI683131, AI049709, AA225890, AI491765, |
| | | | | | AA084609, AA714331, H53284, AW270619, AI587349, AI249365, AW338035, AI887235, AW338021, |
| | | | | | AW302711, H90844, AL120665, AA828619, AW402784, AI144081, AA525331, AI445934, AA829065, |
| | | | | | AA599080, AA828047, AC008372, AC005520, AL096701, AC004797, AC002470, AP000252, |
| | | | | | AC006449, U80017, U91326, AL008719, AP000512, AF111168, AC004383, Ac005914, Z92546, |
| | | | | | AC002544, AC006241, AC003119, AC005632, AP000353, AL121658, AL049839, AC004895, |
| | | | | | AL049757, Z83840, AC005500, AL132712, AC006960, AC006071, AL133448, AL049776, AL022238, |
| | | | | | AC006538, AF017104, AC003006, AL031595, AC006111, AP000045, AL121653, AL035422, |
| | | | | | AP000692, AC005529, AL022313, AL034420, AC006023, AP000113, AL031670, D84394, AC002394, |
| | | | | | AC006077, AL031311, AC006965, AC005971, Z94801, AP000555, AC005391, AC005399, AC007731, |
| | | | | | AC005484, AE000658, Z84469, Z95114, AC007664, AC005086, AL031255, AL035086, AL034548, |
| | | | | | Z99716, AC009247, AL021977, Z98051, AC008134, AC003982, AC005231, AL022336, AC004125, |
| | | | | | AC002352, AL035683, AC003035, AC005081, AL121754, AF118808, AL021154, AL049569, |
| | | | | | AC005005, Z97054, AC004983, AL021808, AC005057, AC004531, AC005722, AC005049, AC005412, |
| | | | | | L78833, AC002472, AL050348, AC004167, AC007792, AL031680, AC005089, U82828, AL031848, |
| | | | | | AC003109, AC003043, AC005537, AC007041, AL031228, AL109801, AC006468, AL035089, Z97056, |
| | | | | | AF064861, AL022721, AP000116, AC006966, AC004382, AP000036, AC006001, AC005619, |
| | | | | | AJ246003, AC005088, AC004884, AF109907, AC006211, AL136295, AC004534, AL035249, Z93023, |
| | | | | | AC004890, AP000694, AC002558, AC007263, AC005082, AL035587, AP000152, AP000501, |
| | | | | | AC004076, AP000066, AC005800, AL109963, AC016831, AC007225, AC009516, U78027, AC005102, |
| | | | | | AC002314, AC004675, AF196779, AC005203, AP0000065, AL031678, AC004050, AC005940, |
| | | | | | AFO31078, AC007226, AC005531, AC002316, AC020663, AC004686, AC004821, AC005796, |
| | | | | | AC007688, AF0882 19, AC005670, AC004771, AC005696, AC005944, AL033533, AC002312, Z95331, |
| | | | | | AF030876, AL049869, Z83822, AC007066, AC000353, AL035071, AL080243, AC002301, AC004985, |
| | | | | | AL02231 1, AF0O 1550, AC005324, AC004967, AL121603, AC010205, AC006017, AL133246 |
| | | | | | AL078581, AL022302, AC004263, AL031588, AC005527, AC003101, Z86090, AC007216, AL021707, |
| | | | | | AP000117, AC006441, AL139054, AC004472, AF207550, AL031258, Z94160, AL049829, AC005821, |
| | | | | | AC005228, AF134726, AL021391, AC007537, AC004520, AC007036, AC002306, AC005996, |
| | | | | | AC004491, AC005237, AC007283, AC003108, AP000350, AC012627, AP000553, AC006958, |
| | | | | | AC002044, AC002 126, AC005225, AC005911, AF031076, AC005694, AF047825, AL031683, |
| | | | | | AC0055 14, AP000356, AD000092, AC005274, AC007129, AL110502, AP000030, AC007536, |
| | | | | | AF196969, AF053356, AL049779, AL032821, AC004858, AC005180, AC005846, AL022327, |
| | | | | | AL022476, AC005229, AC004882, AC005695, and AC007055. |
| HIDAA03 | 275 | 922105 | 1-462 | 15-476 | AA807734. |
| HCLSA61 | 276 | 742264 | 1-396 | 15-410 | N71209. |
| HCLSA35 | 277 | 706334 | 1-521 | 15-535 | W57613, W86870, R82342, R82394, AA172186, and AC006511. |
| HCLCO10 | 278 | 963683 | 1-331 | 15-345 | C02703, and C03259. |
| HCLCM46 | 279 | 718611 | 1-426 | 15-440 | W04299. |
| HCLCM45 | 280 | 717294 | 1-438 | 15-452 | AI168360, AA256314, and AI269402. |
| HCLBY11 | 281 | 966262 | 1-335 | 15-349 | Z46185. |
| HCLBW86 | 282 | 785116 | 1-342 | 15-356 | AA213923. |
| HCLBW52 | 283 | 747728 | 1-599 | 15-613 | AA706316, AI131566, AI141167, AA846828, AI161236, AI148339, AA740424, AA854719, AI092860, |
| | | | | | AI1271 18, W94659, AW009909, AI150077, AI144221, W95733, AA480817, AW001367, W73821, |
| | | | | | W02504, AW0092 19, W58747, W73855, AI092290, AA025788, AI160306, AI090543, AI146274, |
| | | | | | AI093208, W95987, AI659437, AI884343, W69101, AA683607, AA457707, AI807653, AI243460, |
| | | | | | AI201606, AI191440, AA732945, AA733131, AA723266, W69381, AI920791, AA559049, AI968950, |
| | | | | | AI140412, W69100, AW129599, W68286, AI288161, AI276343, W(4668, AI040335, W68306, |
| | | | | | AJ217041, W92535, AI311411, AI240970, AI123650, AA369872, AA025948, C00662, AA022504, |
| | | | | | AI914430, AA897755, W35291, W95776, AW002963, AI915707, AA777022, AI270114, W69380, |
| | | | | | AA359882, AA022503, W25575, H27527, AA722946, W32894, H45934, AI961281, AA157672, |
| | | | | | AF086315, and AD001502. |
| HCLBQ23 | 284 | 675476 | 1-396 | 15-410 | T84825, and AC005477. |
| HCLBH93 | 285 | 791947 | 1-534 | 15-548 | AA001693, AA001694, AA002099, H62770, and H62830. |
| HCLBE41 | 286 | 711947 | 1-330 | 15-344 | H39573. |
| HCLBE01 | 287 | 915533 | 1-454 | 15-468 | H30139, W94391, AA357937, F36273, AA558697, AI431303, AI890923, AA326441, AW169687, |
| | | | | | AA366035, AW419262, AI653886, H13868, F31204, AA501617, AA641989, AI471481, AA443390, |
| | | | | | AA365586, AA515128, AW080811, AAO53551, AI110822, AI880168, AW264973, AW265294, |
| | | | | | AA579140, AW078495, AA551509, AI613280, AL039958, AA593501, N71724, AW419161, A1282907, |
| | | | | | AI557323, AI721122, W25284, AI344844, AW083402, F37286, AI499094, AW083364, AI619997, |
| | | | | | AI761471, H64777, AL046409, AA225155, AI003172, F25203, AI345459, AA587256, AI336660, |
| | | | | | W60516, AAI33986, AL138421, AA773585, AF150222, AA535661, AI061334, H93454, AI053672, |
| | | | | | AW069807, AA329192, AA578251, AI334443, AA653964, AI633390, AI474713, AI963095, |
| | | | | | AA658235, AA584749, AA339752, T53128, AA133001, AA484187, AI358229, AI306524, R35972, |
| | | | | | H49061, AA365347, AI821398, AI821404, AA385100, AA643456, AL041412, AI289067, AI284640, |
| | | | | | AW074398, AI249997, AI305547, AW248803, AW339687, AW249224, AI124660, H92005, AI857261, |
| | | | | | AI678392, AI688846, AW338869, AA580662, AA28329, AI270117, AW302013, F18974, AI049634, |
| | | | | | AW193265, AA071182, AI350211, AA244329, AI305766, AA342914, AW193432, AI610159, |
| | | | | | AA470581, AI635272, AI037914, AI270343, AA457639, AW407007, AI559114, AW276817, |
| | | | | | AI053786, AA581342, N75702, AI299050, AI814735, AI276164, AC015912, AI744188, AA569284, |
| | | | | | AI471729, H98660, AI806850, AW276827, AI375710, AI963720, AI732316, AW173548, AI3411664, |
| | | | | | AI879000, AL133512, AC002301, AC005045, AC004835, AC007543, AC004897, AC005971, |
| | | | | | AF029308, AC006059, AC003973, AC0000119, AC006141, AL034408, AC008249, AC000080, |
| | | | | | AC008044, Z94277, AL033397, AP000567, Z82188, AC002455, AL079342, AC000075, U66061, |
| | | | | | AC005664, U82696, AC005820, AC000097, AC0006547, AC004584, AL033544, AC005154, AL096707, |
| | | | | | AC004810, Z97054, AL049696, AL121578, AC005532, AL035410, Z98742, AL031673, AL049643, |
| | | | | | AC007510, AC006044, AL121694, AC004595, AC006455, AC006372, AC005823, AL117258, |
| | | | | | AC006144, AC006366, AC004386, U91321, AC007114, AL022164, AL109952, AC007240, AP00039, |
| | | | | | AP000107, AL049779, AC004690, AL121877, AC006007, AC004559, AC002384, AL109654, |
| | | | | | AC002418, AB003151, AL109621, AC004409, AJ011930, AC005900, AC006582, AC005159, |
| | | | | | AL022329, AC007363, AC002488, AL022578, AC005303, AF002994, AP000959, AC004869, |
| | | | | | AC004673, AC006536, AL023883, AC004087, AF152363, AL139054, AC004825, AL022100, |
| | | | | | AL132774, AC002064, AL031116, AC005050, Z97198, AC004664, AC003667, AL035466, AC0002126, |
| | | | | | Z99496, AL050337, AC002509, Z83843, AC009263, AC007103, AP000432, AB020865, AC005189, |
| | | | | | AC005841, AC004466, AC007671, Z95124, AP000362, AL021978, AL035417, AL133546, AC005386, |
| | | | | | AC002385, AC005537, AC002378, D83989, AL031664, AL035427, AC005043, AC000029, AL109985, |
| | | | | | U02531, AF217403, AC007999, Z97876, AC002091, AL022721, AP000689, AC002549, AC005191, |
| | | | | | AC004984, AC006152, AL035658, AL022240, AC007314, AL049548, AL035416, AC008062, Z80107, |
| | | | | | AL049650, AL009028, AP000165, AP000302, AP000086, AC007274, AC006509, AC002541, |
| | | | | | AC007666, AL109628, AL049835, Z82215, X55925, AL022149, AL122020, Z74739, AC005180, |
| | | | | | AC007207, AL050308, L13709, L13713, L13707, L13714, AL031294, U57009, AF095725, AC006208, |
| | | | | | AP000275, AL133245, U02532, S75201, AC004057, AF0151169, AL049874, AC004859, AF015148, |
| | | | | | AP000037, AP000105, AP000114, AP000046, AL031428, AL021326, U57004, and AL132826. |
| HCLBD23 | 288 | 675477 | 1-378 | 15-392 | AA064975, AP000465, and AB017654. |
| HCLBA05 | 289 | 931988 | 1-444 | 15-458 | H66095, R92320, and R01818. |
| HBHMI94 | 290 | 794055 | 1-506 | 15-520 | AA013435, and AA4642 |
| HBHMH91 | 291 | 789520 | 1-503 | 15-517 | N47769. |
| HBHMB79 | 292 | 774694 | 1-444 | 15-458 | R51430. |
| HAABL43 | 293 | 968966 | 1-889 | 15-903 | AA412663, AA310441, R33558, R68385, AA308269, AA846690, AI984626, AI675118, AW003506, |
| | | | | | AI972520, AI669210, AA807606, AA236180, AA375578, AI760475, AA766936, AI990288, AI342005, |
| | | | | | AA935544, and AI341456. |
| HAAAU10 | 294 | 961859 | 1-393 | 15-407 | T84357, AF143325, and AL031058. |
| HAAAN12 | 295 | 969399 | 1-852 | 15-866 | AAI67068, AI733906, AA074379, Z99396, AW392670, AW372827, AW384394, AL119497, |
| | | | | | AL119341, AW363220, AL119319, AL119363, U46341, AL119443, AL119457, AL119324, AL119355, |
| | | | | | AL119483, AL119396, AL119335, AL036418, AL038837, AL119484, AL119391, U46350, AL119522, |
| | | | | | U46349, AL037051, AL036725, AA631969, U46351, AL119496, AL0368858, AL119418, AL119399, |
| | | | | | AL042975, AL037205, U46346, U46347, AL119444, AL134920, AL042551, AL038509, AL134518, |
| | | | | | AL042965, AL039074, AL042614, AL134533, AL134528, AL119439, AL036924, AL134902, |
| | | | | | AL042970, U46345, AL042984, AL134538, AL037082, AI142131, AL134531, AL042433, AL037094, |
| | | | | | AL037526, AL036196, AL119488, AL042450, AL037077, AL037639, AL037085, AL039564, |
| | | | | | AL043029, AL039912, AL042544, AL043019, AL134529, AL042542, AL036767, AL036190, |
| | | | | | AL043003, AL036268, AL038851, AL038520, AL038520, AL038447, AL119464, AL036774, AL036733, |
| | | | | | AL036998, AL037178, AL036238, AL037615, AL037027, AL036719, AL036765, AL036191, |
| | | | | | AL036679, AL036158, AL032821, A81671, AR060234, AR066494, AR023813, AR064707, AR069079, |
| | | | | | AR054110, and AB026436. |
| HAAAM04 | 296 | 926254 | 1-513 | 15-527 | R88586, and R88582. |
| HA5BM21 | 297 | 909795 | 1-455 | 15-469 | AI799721, AI369426, AI860961, AW297986, AI087096, AA468537, AA931326, and AC002117. |
| HASAK05 | 298 | 930739 | 1-492 | 15-506 | R19757, and AC007938. |
| HASAC86 | 299 | 952440 | 1-555 | 15-569 | H51348, AA531602, AW247831, AW301099, AI741192, AI091190, AI188197, AA463859, N31905, |
| | | | | | AI769551, AA005363, AA282252, AA620870, C05936, AI913091, AA506009, AA828078, AI198530, |
| | | | | | AI955056, AI220578, AI640599, AA774583, AI026912, AA029271, AA629247, AW044444, AI273495, |
| | | | | | AI744431, AI962397, AA463680, AA749085, AI523940, AI682416, AA463351, AA993136, |
| | | | | | AW273224, AA582696, AI468107, AI985483, AI250892, AA193661, AI244770, AA721467, |
| | | | | | AA234364, AA316216, AA830658, AI370139, R97065, AI123612, AA995736, H64153, H82839, |
| | | | | | F18473, AI612837, AA962793, AI984605, AA034029, and AF174605. |

[0108] TABLE 4

| Code | Description | Tissue | Organ | Cell Line | Disease | Vector |
|---|---|---|---|---|---|---|
| AR022 | a_Heart | a_Heart | | | | |
| AR023 | a_Liver | a_Liver | | | | |
| AR024 | a_mammary gland | a_mammary gland | | | | |
| AR025 | a_Prostate | a_Prostate | | | | |
| AR026 | a_small intestine | a_small intestine | | | | |
| AR027 | a_Stomach | a_Stomach | | | | |
| AR028 | Blood B cells | Blood B cells | | | | |
| AR029 | Blood B cells activated | Blood B cells | | | | |
| | | activated | | | | |
| AR030 | Blood B cells resting | Blood B cells resting | | | | |
| AR031 | Blood T cells activated | Blood T cells | | | | |
| | | activated | | | | |
| AR032 | Blood T cells resting | Blood T cells resting | | | | |
| AR033 | brain | brain | | | | |
| AR034 | breast | breast | | | | |
| AR035 | breast cancer | breast cancer | | | | |
| AR036 | Cell Line CAOV3 | Cell Line CAOV3 | | | | |
| AR037 | cell line PA-1 | cell line PA-1 | | | | |
| AR038 | cell line transformed | cell line transformed | | | | |
| AR039 | colon | colon | | | | |
| AR040 | colon (9808co65R) | colon (9808co65R) | | | | |
| AR041 | colon (9809co15) | colon (9809co15) | | | | |
| AR042 | colon cancer | colon cancer | | | | |
| AR043 | colon cancer | colon cancer | | | | |
| | (9808co64R) | (9808co64R) | | | | |
| AR044 | colon cancer 9809co14 | colon cancer | | | | |
| | | 9809co14 | | | | |
| AR045 | corn clone 5 | corn clone 5 | | | | |
| AR046 | corn clone 6 | corn clone 6 | | | | |
| AR047 | corn clone2 | corn clone2 | | | | |
| AR048 | corn clone3 | corn clone3 | | | | |
| AR049 | Corn Clone4 | Corn Clone4 | | | | |
| AR050 | Donor II B Cells 24 hrs | Donor II B Cells | | | | |
| | | 24 hrs | | | | |
| AR051 | Donor II B Cells 72 hrs | Donor II B Cells | | | | |
| | | 72 hrs | | | | |
| AR052 | Donor II B-Cells 24 hrs. | Donor II B-Cells 24 | | | | |
| | | hrs. | | | | |
| AR053 | Donor II B-Cells 72 hrs | Donor II B-Cells | | | | |
| | | 72 hrs | | | | |
| AR054 | Donor II Resting B Cells | Donor II Resting B | | | | |
| | | Cells | | | | |
| AR055 | Heart | Heart | | | | |
| AR056 | Human Lung (clonetech) | Human Lung | | | | |
| | | (clonetech) | | | | |
| AR057 | Human Mammary | Human Mammary | | | | |
| | (clontech) | (clontech) | | | | |
| AR058 | Human Thymus | Human Thymus | | | | |
| | (clonetech) | (clonetech) | | | | |
| AR059 | Jurkat (unstimulated) | Jurkat (unstimulated) | | | | |
| AR060 | Kidney | Kidney | | | | |
| AR061 | Liver | Liver | | | | |
| AR062 | Liver (Clontech) | Liver (Clontech) | | | | |
| AR063 | Lymphocytes chronic | Lymphocytes chronic | | | | |
| | lymphocytic leukaemia | lymphocytic | | | | |
| | | leukaemia | | | | |
| AR064 | Lymphocytes diffuse | Lymphocytes diffuse | | | | |
| | large B cell lymphoma | large B cell | | | | |
| | | lymphoma | | | | |
| AR065 | Lymphocytes follicular | Lymphocytes | | | | |
| | lymphoma | follicular lymphoma | | | | |
| AR066 | normal breast | normal breast | | | | |
| AR067 | Normal Ovarian | Normal Ovarian | | | | |
| | (4004901) | (4004901) | | | | |
| AR068 | Normal Ovary 9508G045 | Normal Ovary | | | | |
| | | 9508G045 | | | | |
| AR069 | Normal Ovary 9701G208 | Normal Ovary | | | | |
| | | 9701G208 | | | | |
| AR070 | Normal Ovary 9806G005 | Normal Ovary | | | | |
| | | 9806G005 | | | | |
| AR071 | Ovarian Cancer | Ovarian Cancer | | | | |
| AR072 | Ovarian Cancer | Ovarian Cancer | | | | |
| | (9702G001) | (9702G001) | | | | |
| AR073 | Ovarian Cancer | Ovarian Cancer | | | | |
| | (9707G029) | (9707G029) | | | | |
| AR074 | Ovarian Cancer | Ovarian Cancer | | | | |
| | (9804G011) | (9804G011) | | | | |
| AR075 | Ovarian Cancer | Ovarian Cancer | | | | |
| | (9806G019) | (9806G019) | | | | |
| AR076 | Ovarian Cancer | Ovarian Cancer | | | | |
| | (9807G017) | (9807G017) | | | | |
| AR077 | Ovarian Cancer | Ovarian Cancer | | | | |
| | (9809G001) | (9809G001) | | | | |
| AR078 | ovarian cancer 15799 | ovarian cancer 15799 | | | | |
| AR079 | Ovarian Cancer | Ovarian Cancer | | | | |
| | 17717AID | 17717AID | | | | |
| AR080 | Ovarian Cancer | Ovarian Cancer | | | | |
| | 4004664B1 | 4004664B1 | | | | |
| AR081 | Ovarian Cancer | Ovarian Cancer | | | | |
| | 4005315A1 | 4005315A1 | | | | |
| AR082 | ovarian cancer 94127303 | ovarian cancer | | | | |
| | | 94127303 | | | | |
| AR083 | Ovarian Cancer | Ovarian Cancer | | | | |
| | 96069304 | 96069304 | | | | |
| AR084 | Ovarian Cancer | Ovarian Cancer | | | | |
| | 9707G029 | 9707G029 | | | | |
| AR085 | Ovarian Cancer | Ovarian Cancer | | | | |
| | 9807G045 | 9807G045 | | | | |
| AR086 | ovarian cancer | ovarian cancer | | | | |
| | 9809G001 | 9809G001 | | | | |
| AR087 | Ovarian Cancer | Ovarian Cancer | | | | |
| | 9905C032RC | 9905C032RC | | | | |
| AR088 | Ovarian cancer 9907 C00 | Ovarian cancer 9907 | | | | |
| | 3rd | C00 3rd | | | | |
| AR089 | Prostate | Prostate | | | | |
| AR090 | Prostate (clonetech) | Prostate (clonetech) | | | | |
| AR091 | prostate cancer | prostate cancer | | | | |
| AR092 | prostate cancer #15176 | prostate cancer | | | | |
| | | #15176 | | | | |
| AR093 | prostate cancer #15509 | prostate cancer | | | | |
| | | #15509 | | | | |
| AR094 | prostate cancer #15673 | prostate cancer | | | | |
| | | #15673 | | | | |
| AR095 | Small Intestine | Small Intestine | | | | |
| | (Clontech) | (Clontech) | | | | |
| AR096 | Spleen | Spleen | | | | |
| AR097 | Thymus T cells activated | Thymus T cells | | | | |
| | | activated | | | | |
| AR098 | Thymus T cells resting | Thymus T cells | | | | |
| | | resting | | | | |
| AR099 | Tonsil | Tonsil | | | | |
| AR100 | Tonsil geminal center | Tonsil geminal center | | | | |
| | centroblast | centroblast | | | | |
| AR101 | Tonsil germinal center B | Tonsil germinal | | | | |
| | cell | center B cell | | | | |
| AR102 | Tonsil lymph node | Tonsil lymph node | | | | |
| AR103 | Tonsil memory B cell | Tonsil memory B cell | | | | |
| AR104 | Whole Brain | Whole Brain | | | | |
| AR105 | Xenograft ES-2 | Xenograft ES-2 | | | | |
| AR106 | Xenograft SW626 | Xenograft SW626 | | | | |
| H0024 | Human Fetal Lung III | Human Fetal Lung | Lung | | | Uni-ZAP XR |
| H0099 | Human Lung Cancer, | Human Lung Cancer | Lung | | | pBluescript |
| | subtracted | | | | | |
| H0164 | Human Trachea Tumor | Human Trachea | Trachea | | disease | Uni-ZAP XR |
| | | Tumor | | | | |
| H0208 | Early Stage Human | Human Fetal Lung | Lung | | | pBluescript |
| | Lung, subtracted | | | | | |
| H0375 | Human Lung | Human Lung | | | | pCMVSport 1 |
| H0528 | Poly[I]/Poly[C] Normal | Poly[I]/Poly[C] | | | | pCMVSport |
| | Lung Fibroblasts | Normal Lung | | | | 3.0 |
| | | Fibroblasts | | | | |
| H0594 | Human Lung Cancer; re- | Human Lung Cancer | Lung | | disease | Lambda ZAP |
| | excision | | | | | II |
| H0633 | Lung Carcinoma A549 | TNFalpha activated | | | disease | pSport1 |
| | TNFalpha activated | A549--Lung | | | | |
| | | Carcinoma | | | | |
| H0646 | Lung, Cancer (4005313 | Metastatic squamous | | | | pSport1 |
| | A3): Invasive Poorly | cell lung carcinoma, | | | | |
| | Differentiated Lung | poorly di | | | | |
| | Adenocarcinoma, | | | | | |
| H0647 | Lung, Cancer (4005163 | Invasive poorly | | | disease | pSport1 |
| | B7): Invasive, Poorly | differentiated lung | | | | |
| | Diff. Adenocarcinoma, | adenocarcinoma | | | | |
| | Metastatic | | | | | |
| H0649 | Lung, Normal: (4005313 | Normal Lung | | | | pSport1 |
| | B1) | | | | | |
| H0652 | Lung, Normal: (4005313 | Normal Lung | | | | pSport1 |
| | B1) | | | | | |
| H0654 | Lung, Cancer: (4005313 | Metastatic Squamous | | | | Other |
| | A3) Invasive Poorly- | cell lung Carcinoma | | | | |
| | differentiated Metastatic | poorly dif | | | | |
| | lung adenoc | | | | | |
| S0296 | Normal lung | Normal lung | Lung | | | pSport1 |
| S0310 | Normal trachea | Normal trachea | | | | pSport1 |
| T0003 | Human Fetal Lung | Human Fetal Lung | | | | pBluescript |
| | | | | | | SK- |
| L0005 | Clontech human aorta | | | | | |
| | polyA+ mRNA (#6572) | | | | | |
| L0105 | Human aorta polyA+ | aorta | | | | |
| | (TFujiwara) | | | | | |
| L0163 | Human heart cDNA | | heart | | | |
| | (YNakamura) | | | | | |
| L0362 | Stratagene ovarian | | | | | Bluescript |
| | cancer (#937219) | | | | | SK- |
| L0369 | NCI_CGAP_AA1 | adrenal adenoma | adrenal | | | Bluescript |
| | | | gland | | | SK- |
| L0375 | NCI_CGAP_Kid6 | kidney tumor | kidney | | | Bluescript |
| | | | | | | SK- |
| L0387 | NCI_CGAP_GCB0 | germinal center B- | tonsil | | | Bluescript |
| | | cells | | | | SK- |
| L0435 | Infant brain, LLNL array | | | | | lafmid BA |
| | of Dr. M. Soares 1NIB | | | | | |
| L0438 | normalized infant brain | total brain | brain | | | lafmid BA |
| | cDNA | | | | | |
| L0439 | Soares infant brain 1NIB | | whole brain | | | Lafmid BA |
| L0455 | Human retina cDNA | retina | eye | | | lambda gt10 |
| | randomly primed | | | | | |
| | sublibrary | | | | | |
| L0456 | Human retina cDNA | retina | eye | | | lambda gt10 |
| | Tsp509I-cleaved | | | | | |
| | sublibrary | | | | | |
| L0523 | NCI_CGAP_Lip2 | liposarcoma | | | | pAMP10 |
| L0527 | NCI_CGAP_Ov2 | ovary | | | | pAMP10 |
| L0530 | NCI_CGAP_Pr8 | prostate | | | | pAMP10 |
| L0540 | NCI_CGAP_Pr10 | invasive prostate | prostate | | | pAMP10 |
| | | tumor | | | | |
| L0547 | NCI_CGAP_Pr16 | tumor | prostate | | | pAMP10 |
| L0581 | Stratagene liver | | liver | | | pBluescript |
| | (#937224) | | | | | SK |
| L0589 | Stratagene fetal retina | | | | | pBluescript |
| | 937202 | | | | | SK- |
| L0591 | Stratagene HeLa cell s3 | | | | | pBluescript |
| | 937216 | | | | | SK- |
| L0592 | Stratagene hNT neuron | | | | | pBluescript |
| | (#937233) | | | | | SK- |
| L0593 | Stratagene | | | | | pBluescript |
| | neuroepithelium | | | | | SK- |
| | (#937231) | | | | | |
| L0595 | Stratagene NT2 neuronal | neuroepithelial cells | brain | | | pBluescript |
| | precursor 937230 | | | | | SK- |
| L0596 | Stratagene colon | | colon | | | pBluescript |
| | (#937204) | | | | | SK- |
| L0598 | Morton Fetal Cochlea | cochlea | ear | | | pBluescript |
| | | | | | | SK- |
| L0599 | Stratagene lung | | lung | | | pBluescript |
| | (#937210) | | | | | SK- |
| L0601 | Stratagene pancreas | | pancreas | | | pBluescript |
| | (#937208) | | | | | SK- |
| L0605 | Stratagene fetal spleen | fetal spleen | spleen | | | pBluescript |
| | (#937205) | | | | | SK- |
| L0639 | NCI_CGAP_Brn52 | tumor, 5 pooled (see | brain | | | pCMV- |
| | | description) | | | | SPORT6 |
| L0659 | NCI_CGAP_Pan1 | adenocarcinoma | pancreas | | | pCMV- |
| | | | | | | SPORT6 |
| L0666 | NCI.CGAP_Ut1 | well-differentiated | uterus | | | pCMV- |
| | | endometrial | | | | SPORT6 |
| | | adenocarcinoma, 7 | | | | |
| L0740 | Soares melanocyte | melanocyte | | | | pT7T3D |
| | 2NbHM | | | | | (Pharmacia) |
| | | | | | | with a |
| | | | | | | modified |
| | | | | | | polylinker |
| L0741 | Soares adult brain | | brain | | | pT7T3D |
| | N2b4HB55Y | | | | | (Pharmacia) |
| | | | | | | with a |
| | | | | | | modified |
| | | | | | | polylinker |
| L0742 | Soares adult brain | | brain | | | pT7T3D |
| | N2b5HB55Y | | | | | (Pharmacia) |
| | | | | | | with a |
| | | | | | | modified |
| | | | | | | polylinker |
| L0743 | Soares breast 2NbHBst | | breast | | | pT7T3D |
| | | | | | | (Pharmacia) |
| | | | | | | with a |
| | | | | | | modified |
| | | | | | | polylinker |
| L0744 | Soares breast 3NbHBst | | breast | | | pT7T3D |
| | | | | | | (Pharmacia) |
| | | | | | | with a |
| | | | | | | modified |
| | | | | | | polylinker |
| L0745 | Soares retina N2b4HR | retina | eye | | | pT7T3D |
| | | | | | | (Pharmacia) |
| | | | | | | with a |
| | | | | | | modified |
| | | | | | | polylinker |
| L0747 | Soares_fetal_heart_NbH | | heart | | | pT7T3D |
| | H19W | | | | | (Pharmacia) |
| | | | | | | with a |
| | | | | | | modified |
| | | | | | | polylinker |
| L0748 | Soares fetal liver spleen | | Liver and | | | pT7T3D |
| | 1NFLS | | Spleen | | | (Pharmacia) |
| | | | | | | with a |
| | | | | | | modified |
| | | | | | | polylinker |
| L0749 | Soares_fetal_liver_splee | | Liver and | | | pT7T3D |
| | n_1NFLS_S1 | | Spleen | | | (Pharmacia) |
| | | | | | | with a |
| | | | | | | modified |
| | | | | | | polylinker |
| L0750 | Soares_fetal_lung_NbHL | | lung | | pT713D | |
| | 19W | | | | | (Pharmacia) |
| | | | | | | with a |
| | | | | | | modified |
| | | | | | | polylinker |
| L0751 | Soares ovary tumor | ovarian tumor | ovary | | | pT7T3D |
| | NbHOT | | | | | (Pharmacia) |
| | | | | | | with a |
| | | | | | | modified |
| | | | | | | polylinker |
| L0752 | Soares_parathyroid_tum | parathyroid tumor | parathyroid | | | pT7T3D |
| | or_NbHPA | | gland | | | (Pharmacia) |
| | | | | | | with a |
| | | | | | | modified |
| | | | | | | polylinker |
| L0753 | Soares_pineal_gland_N3 | | pineal gland | | | pT7T3D |
| | HPG | | | | | (Pharmacia) |
| | | | | | | with a |
| | | | | | | modified |
| | | | | | | polylinker |
| L0754 | Soares placenta Nb2HP | | placenta | | | pT7T3D |
| | | | | | | (Pharmacia) |
| | | | | | | with a |
| | | | | | | modified |
| | | | | | | polylinker |
| L0756 | Soares_multiple_sclerosi | multiple sclerosis | | | | pT7T3D |
| | s_2NbHMSP | lesions | | | | (Pharmacia) |
| | | | | | | with a |
| | | | | | | modified |
| | | | | | | polylinker |
| | | | | | | V_TYPE |
| L0757 | Soares_senescent_fibrobl | senescent fibroblast | | | | pT7T3D |
| | asts_NbHSF | | | | | (Pharmacia) |
| | | | | | | with a |
| | | | | | | modified |
| | | | | | | polylinker |
| | | | | | | V_TYPE |
| L0758 | Soares_testis_NHT | | | | | pT7T3D-Pac |
| | | | | | | (Pharmacia) |
| | | | | | | with a |
| | | | | | | modified |
| | | | | | | polylinker |
| L0759 | Soares_total_fetus_Nb2 | | | | | pT7T3D-Pac |
| | HF8_9w | | | | | (Pharmacia) |
| | | | | | | with a |
| | | | | | | modified |
| | | | | | | polylinker |
| L0763 | NCI_CGAP_Br2 | breast | | | | pT7T3D-Pac |
| | | | | | | (Pharmacia) |
| | | | | | | with a |
| | | | | | | modified |
| | | | | | | polylinker |
| L0764 | NCI_CGAP_Co3 | colon | | | | pT7T3D-Pac |
| | | | | | | (Pharmacia) |
| | | | | | | with a |
| | | | | | | modified |
| | | | | | | polylinker |
| L0766 | NCI_CGAP_GCB1 | germinal center B | | | | pT7T3D-Pac |
| | | cell | | | | (Pharmacia) |
| | | | | | | with a |
| | | | | | | modified |
| | | | | | | polylinker |
| L0769 | NCI_CGAP_Brn25 | anaplastic | brain | | | pT7T3D-Pac |
| | | oligodendroglioma | | | | (Pharmacia) |
| | | | | | | with a |
| | | | | | | modified |
| | | | | | | polylinker |
| L0772 | NCI_CGAP_Co10 | colon tumor RER+ | colon | | | pT7T3D-Pac |
| | | | | | | (Pharmacia) |
| | | | | | | with a |
| | | | | | | modified |
| | | | | | | polylinker |
| L0773 | NCI_CGAP_Co9 | colon tumor RER+ | colon | | | pT7T3D-Pac |
| | | | | | | (Pharmacia) |
| | | | | | | with a |
| | | | | | | modified |
| | | | | | | polylinker |
| L0776 | NCI_CGAP_Lu5 | carcinoid | lung | | | pT7T3D-Pac |
| | | | | | | (Pharmacia) |
| | | | | | | with a |
| | | | | | | modified |
| | | | | | | polylinker |
| L0777 | Soares_NhHMPu_S1 | Pooled human | mixed (see | | | pT7T3D-Pac |
| | | melanocyte, fetal | below) | | | (Pharmacia) |
| | | heart, and pregnant | | | | with a |
| | | | | | | modified |
| | | | | | | polylinker |
| L0779 | Soares_NFL_T_GBC_S1 | | pooled | | | pT7T3D-Pac |
| | | | | | | (Pharmacia) |
| | | | | | | with a |
| | | | | | | modified |
| | | | | | | polylinker |
| L0794 | NCI_CGAP_GC6 | pooled germ cell | | | | pT7T3D-Pac |
| | | tumors | | | | (Pharmacia) |
| | | | | | | with a |
| | | | | | | modified |
| | | | | | | polylinker |
| L0803 | NCI_CGAP_Kid11 | | kidney | | | pT7T3D-Pac |
| | | | | | | (Pharmacia) |
| | | | | | | with a |
| | | | | | | modified |
| | | | | | | polylinker |
| L0807 | NCI_CGAP_Ov18 | fibrotheoma | ovary | | | pT7T3D-Pac |
| | | | | | | (Pharmacia) |
| | | | | | | with a |
| | | | | | | modified |
| | | | | | | polylinker |

[0109] TABLE 5

| OMIM | |
|---|---|
| Reference | Description |
| 106180 | Myocardial infarction, susceptibility to |
| 138700 | [Apolipoprotein H deficiency] |
| 139250 | Isolated growth hormone deficiency, Illig type with absent GH |
| | and Kowarski type with bioinactive GH |
| 150200 | [Placental lactogen deficiency] |
| 154275 | Malignant hyperthermia susceptibility 2 |
| 176960 | Pituitary tumor, invasive |
| 188450 | Goiter, adolescent multinodular |
| 188450 | Goiter, nonendemic, simple |
| 188450 | Hypothyroidism, hereditary congenital |
| 226200 | Enterokinase deficiency |
| 249000 | Meckel syndrome |
| 253250 | Mulibrey nanism |
| 602097 | Usher syndrome, type 1E |

[0110] Polynucleotide and Polypeptide Variants

[0111] The present invention is also directed to variants of the respiratory system associated polynucleotide sequence disclosed in SEQ ID NO:X or the complementary strand thereto, nucleotide sequences encoding the polypeptide of SEQ ID NO:Y, the nucleotide sequence of SEQ ID NO:X encoding the polypeptide sequence as defined in column 6 of Table 1A, nucleotide sequences encoding the polypeptide as defined in column 6 of Table 1A, the nucleotide sequence as defined in columns 8 and 9 of Table 2, nucleotide sequences encoding the polypeptide encoded by the nucleotide sequence as defined in columns 8 and 9 of Table 2, the nucleotide sequence as defined in column 6 of Table 1B, nucleotide sequences encoding the polypeptide encoded by the nucleotide sequence as defined in column 6 of Table 1B, the cDNA sequence contained in Clone ID NO:Z, and/or nucleotide sequences encoding a polypeptide encoded by the cDNA sequence contained in Clone ID NO:Z.

[0112] The present invention also encompasses variants of the polypeptide sequence disclosed in SEQ ID NO:Y, a polypeptide sequence as defined in column 6 of Table 1A, a polypeptide sequence encoded by the polynucleotide sequence in SEQ ID NO:X, a polypeptide sequence encoded by the nucleotide sequence as defined in columns 8 and 9 of Table 2, a polypeptide sequence encoded by the nucleotide sequence as defined in column 6 of Table 1B, a polypeptide sequence encoded by the complement of the polynucleotide sequence in SEQ ID NO:X, and/or a polypeptide sequence encoded by the cDNA sequence contained in Clone ID NO:Z.

[0113] “Variant” refers to a polynucleotide or polypeptide differing from the polynucleotide or polypeptide of the present invention, but retaining essential properties thereof. Generally, variants are overall closely similar, and, in many regions, identical to the polynucleotide or polypeptide of the present invention.

[0114] Thus, one aspect of the invention provides an isolated nucleic acid molecule comprising, or alternatively consisting of, a polynucleotide having a nucleotide sequence selected from the group consisting of: (a) a nucleotide sequence described in SEQ ID NO:X or contained in the cDNA sequence of Clone ID NO:Z; (b) a nucleotide sequence in SEQ ID NO:X or the cDNA in Clone ID NO:Z which encodes a mature respiratory system associated polypeptide; (c) a nucleotide sequence in SEQ ID NO:X or the cDNA sequence of Clone ID NO:Z, which encodes a biologically active fragment of a respiratory system associated polypeptide; (d) a nucleotide sequence in SEQ ID NO:X or the cDNA sequence of Clone ID NO:Z, which encodes an antigenic fragment of a respiratory system associated polypeptide; (e) a nucleotide sequence encoding a respiratory system associated polypeptide having the complete amino acid sequence of SEQ ID NO:Y or the complete amino acid sequence encoded by the cDNA in Clone ID NO:Z; (f) a nucleotide sequence encoding a mature respiratory system associated polypeptide of the amino acid sequence of SEQ ID NO:Y or the amino acid sequence encoded by the cDNA in Clone ID NO:Z; (g) a nucleotide sequence encoding a biologically active fragment of a respiratory system associated polypeptide having the complete amino acid sequence of SEQ ID NO:Y or the complete amino acid sequence encoded by the cDNA in Clone ID NO:Z; (h) a nucleotide sequence encoding an antigenic fragment of a respiratory system associated polypeptide having the complete amino acid sequence of SEQ ID NO:Y or the complete amino acid sequence encoded by the cDNA in Clone ID NO:Z; and (i) a nucleotide sequence complementary to any of the nucleotide sequences in (a), (b), (c), (d), (e), (f), (g), or (h), above.

[0115] The present invention is also directed to nucleic acid molecules which comprise, or alternatively consist of, a nucleotide sequence which is at least 80%, 85%, 90%, 95%, 96%, 97%, 98%, 99% or 100%, identical to, for example, any of the nucleotide sequences in (a), (b), (c), (d), (e), (f), (g), (h), or (i) above, the nucleotide coding sequence in SEQ ID NO:X or the complementary strand thereto, the nucleotide coding sequence of the cDNA contained in Clone ID NO:Z or the complementary strand thereto, a nucleotide sequence encoding the polypeptide of SEQ ID NO:Y, a nucleotide sequence encoding a polypeptide sequence encoded by the nucleotide sequence in SEQ ID NO:X, a polypeptide sequence encoded by the complement of the polynucleotide sequence in SEQ ID NO:X, a nucleotide sequence encoding the polypeptide encoded by the cDNA contained in Clone ID NO:Z, the nucleotide coding sequence in SEQ ID NO:X as defined in columns 8 and 9 of Table 2 or the complementary strand thereto, a nucleotide sequence encoding the polypeptide encoded by the nucleotide sequence in SEQ ID NO:X as defined in columns 8 and 9 of Table 2 or the complementary strand thereto, the nucleotide coding sequence in SEQ ID NO:B as defined in column 6 of Table 1B or the complementary strand thereto, a nucleotide sequence encoding the polypeptide encoded by the nucleotide sequence in SEQ ID NO:B as defined in column 6 of Table 1B or the complementary strand thereto, the nucleotide sequence in SEQ ID NO:X encoding the polypeptide sequence as defined in column 6 of Table 1A or the complementary strand thereto, nucleotide sequences encoding a polypeptide as defined in column 6 of Table 1A or the complementary strand thereto, and/or polynucleotide fragments of any of these nucleic acid molecules (e.g., those fragments described herein). Polynucleotides which hybridize to the complement of these nucleic acid molecules under stringent hybridization conditions or alternatively, under lower stringency conditions, are also encompassed by the invention, as are polypeptides encoded by these polynucleotides and nucleic acids.

[0116] In a preferred embodiment, the invention encompasses nucleic acid molecules which comprise, or alternatively, consist of a polynucleotide which hybridizes under stringent hybridization conditions, or alternatively, under lower stringency conditions, to a polynucleotide in (a), (b), (c), (d), (e), (f), (g), (h), or (i) above, as are polypeptides encoded by these polynucleotides. In another preferred embodiment, polynucleotides which hybridize to the complement of these nucleic acid molecules under stringent hybridization conditions or alternatively, under lower stringency conditions, are also encompassed by the invention, as are polypeptides encoded by these polynucleotides.

[0117] In another embodiment, the invention provides a purified protein comprising, or alternatively consisting of, a polypeptide having an amino acid sequence selected from the group consisting of: (a) the complete amino acid sequence of SEQ ID NO:Y or the complete amino acid sequence encoded by the cDNA in Clone ID NO:Z; (b) the amino acid sequence of a mature respiratory system associated polypeptide having the amino acid sequence of SEQ ID NO:Y or the amino acid sequence encoded by the cDNA in Clone ID NO:Z; (c) the amino acid sequence of a biologically active fragment of a respiratory system associated polypeptide having the complete amino acid sequence of SEQ ID NO:Y or the complete amino acid sequence encoded by the cDNA in Clone ID NO:Z; and (d) the amino acid sequence of an antigenic fragment of a respiratory system associated polypeptide having the complete amino acid sequence of SEQ ID NO:Y or the complete amino acid sequence encoded by the cDNA in Clone ID NO:Z.

[0118] The present invention is also directed to proteins which comprise, or alternatively consist of, an amino acid sequence which is at least 80%, 85%, 90%, 95%, 96%, 97%, 98%, 99% or 100%, identical to, for example, any of the amino acid sequences in (a), (b), (c), or (d), above, the amino acid sequence shown in SEQ ID NO:Y, the amino acid sequence encoded by the cDNA contained in Clone ID NO:Z, the amino acid sequence of the polypeptide encoded by the nucleotide sequence in SEQ ID NO:X as defined in columns 8 and 9 of Table 2, the amino acid sequence of the polypeptide encoded by the nucleotide sequence in SEQ ID NO:B as defined in column 6 of Table 1B, the amino acid sequence as defined in column 6 of Table 1A, an amino acid sequence encoded by the nucleotide sequence in SEQ ID NO:X, and an amino acid sequence encoded by the complement of the polynucleotide sequence in SEQ ID NO:X. Fragments of these polypeptides are also provided (e.g., those fragments described herein). Further proteins encoded by polynucleotides which hybridize to the complement of the nucleic acid molecules encoding these amino acid sequences under stringent hybridization conditions or alternatively, under lower stringency conditions, are also encompassed by the invention, as are the polynucleotides encoding these proteins.

[0119] By a nucleic acid having a nucleotide sequence at least, for example, 95% “identical” to a reference nucleotide sequence of the present invention, it is intended that the nucleotide sequence of the nucleic acid is identical to the reference sequence except that the nucleotide sequence may include up to five point mutations per each 100 nucleotides of the reference nucleotide sequence encoding the polypeptide. In other words, to obtain a nucleic acid having a nucleotide sequence at least 95% identical to a reference nucleotide sequence, up to 5% of the nucleotides in the reference sequence may be deleted or substituted with another nucleotide, or a number of nucleotides up to 5% of the total nucleotides in the reference sequence may be inserted into the reference sequence. The query sequence may be an entire sequence referred to in Table 1A or 2 as the ORF (open reading frame), or any fragment specified, as described herein.

[0120] As a practical matter, whether any particular nucleic acid molecule or polypeptide is at least 80%, 85%, 90%, 95%, 96%, 97%, 98% or 99% identical to a nucleotide sequence of the present invention can be determined conventionally using known computer programs. A preferred method for determining the best overall match between a query sequence (a sequence of the present invention) and a subject sequence, also referred to as a global sequence alignment, can be determined using the FASTDB computer program based on the algorithm of Brutlag et al. (Comp. App. Biosci. 6:237-245 (1990)). In a sequence alignment the query and subject sequences are both DNA sequences. An RNA sequence can be compared by converting U's to T's. The result of said global sequence alignment is expressed as percent identity. Preferred parameters used in a FASTDB alignment of DNA sequences to calculate percent identity are: Matrix=Unitary, k-tuple=4, Mismatch Penalty=1, Joining Penalty=30, Randomization Group Length=0, Cutoff Score=1, Gap Penalty=5, Gap Size Penalty 0.05, Window Size=500 or the length of the subject nucleotide sequence, whichever is shorter.

[0121] If the subject sequence is shorter than the query sequence because of 5′ or 3′ deletions, not because of internal deletions, a manual correction must be made to the results. This is because the FASTDB program does not account for 5′ and 3′ truncations of the subject sequence when calculating percent identity. For subject sequences truncated at the 5′ or 3′ ends, relative to the query sequence, the percent identity is corrected by calculating the number of bases of the query sequence that are 5′ and 3′ of the subject sequence, which are not matched/aligned, as a percent of the total bases of the query sequence. Whether a nucleotide is matched/aligned is determined by results of the FASTDB sequence alignment. This percentage is then subtracted from the percent identity, calculated by the above FASTDB program using the specified parameters, to arrive at a final percent identity score. This corrected score is what is used for the purposes of the present invention. Only bases outside the 5′ and 3′ bases of the subject sequence, as displayed by the FASTDB alignment, which are not matched/aligned with the query sequence, are calculated for the purposes of manually adjusting the percent identity score.

[0122] For example, a 90 base subject sequence is aligned to a 100 base query sequence to determine percent identity. The deletions occur at the 5′ end of the subject sequence and therefore, the FASTDB alignment does not show a matched/alignment of the first 10 bases at 5′ end. The 10 unpaired bases represent 10% of the sequence (number of bases at the 5′ and 3′ ends not matched/total number of bases in the query sequence) so 10% is subtracted from the percent identity score calculated by the FASTDB program. If the remaining 90 bases were perfectly matched the final percent identity would be 90%. In another example, a 90 base subject sequence is compared with a 100 base query sequence. This time the deletions are internal deletions so that there are no bases on the 5′ or 3′ of the subject sequence which are not matched/aligned with the query. In this case the percent identity calculated by FASTDB is not manually corrected. Once again, only bases 5′ and 3′ of the subject sequence which are not matched/aligned with the query sequence are manually corrected for. No other manual corrections are to made for the purposes of the present invention.

[0123] By a polypeptide having an amino acid sequence at least, for example, 95% “identical” to a query amino acid sequence of the present invention, it is intended that the amino acid sequence of the subject polypeptide is identical to the query sequence except that the subject polypeptide sequence may include up to five amino acid alterations per each 100 amino acids of the query amino acid sequence. In other words, to obtain a polypeptide having an amino acid sequence at least 95% identical to a query amino acid sequence, up to 5% of the amino acid residues in the subject sequence may be inserted, deleted, (indels) or substituted with another amino acid. These alterations of the reference sequence may occur at the amino or carboxy terminal positions of the reference amino acid sequence or anywhere between those terminal positions, interspersed either individually among residues in the reference sequence or in one or more contiguous groups within the reference sequence.

[0124] As a practical matter, whether any particular polypeptide is at least 80%, 85%, 90%, 95%, 96%, 97%, 98% or 99% identical to, for instance, the amino acid sequence of a polypeptide referred to in Table 1A (e.g., an amino acid sequence identified in columns 5 or 6) or Table 2 (e.g., the amino acid sequence of the polypeptide encoded by the polynucleotide sequence defined in columns 8 and 9 of Table 2) or a fragment thereof, the amino acid sequence of the polypeptide encoded by the polynucleotide sequence in SEQ ID NO:B as defined in column 6 of Table 1B or a fragment thereof, the amino acid sequence of the polypeptide encoded by the nucleotide sequence in SEQ ID NO:X or a fragment thereof, or an amino acid sequence of the polypeptide encoded by cDNA contained in Clone ID NO:Z, or a fragment thereof, can be determined conventionally using known computer programs. A preferred method for determining the best overall match between a query sequence (a sequence of the present invention) and a subject sequence, also referred to as a global sequence alignment, can be determined using the FASTDB computer program based on the algorithm of Brutlag et al. (Comp. App. Biosci.6:237-245 (1990)). In a sequence alignment the query and subject sequences are either both nucleotide sequences or both amino acid sequences. The result of said global sequence alignment is expressed as percent identity. Preferred parameters used in a FASTDB amino acid alignment are: Matrix=PAM 0, k-tuple=2, Mismatch Penalty=1, Joining Penalty=20, Randomization Group Length=0, Cutoff Score=1, Window Size=sequence length, Gap Penalty=5, Gap Size Penalty=0.05, Window Size=500 or the length of the subject amino acid sequence, whichever is shorter.

[0125] If the subject sequence is shorter than the query sequence due to N- or C-terminal deletions, not because of internal deletions, a manual correction must be made to the results. This is because the FASTDB program does not account for N- and C-terminal truncations of the subject sequence when calculating global percent identity. For subject sequences truncated at the N- and C-termini, relative to the query sequence, the percent identity is corrected by calculating the number of residues of the query sequence that are N- and C-terminal of the subject sequence, which are not matched/aligned with a corresponding subject residue, as a percent of the total bases of the query sequence. Whether a residue is matched/aligned is determined by results of the FASTDB sequence alignment. This percentage is then subtracted from the percent identity, calculated by the above FASTDB program using the specified parameters, to arrive at a final percent identity score. This final percent identity score is what is used for the purposes of the present invention. Only residues to the N- and C-termini of the subject sequence, which are not matched/aligned with the query sequence, are considered for the purposes of manually adjusting the percent identity score. That is, only query residue positions outside the farthest N- and C-terminal residues of the subject sequence.

[0126] For example, a 90 amino acid residue subject sequence is aligned with a 100 residue query sequence to determine percent identity. The deletion occurs at the N-terminus of the subject sequence and therefore, the FASTDB alignment does not show a matching/alignment of the first 10 residues at the N-terminus. The 10 unpaired residues represent 10% of the sequence (number of residues at the N- and C-termini not matched/total number of residues in the query sequence) so 10% is subtracted from the percent identity score calculated by the FASTDB program. If the remaining 90 residues were perfectly matched the final percent identity would be 90%. In another example, a 90 residue subject sequence is compared with a 100 residue query sequence. This time the deletions are internal deletions so there are no residues at the N- or C-termini of the subject sequence which are not matched/aligned with the query. In this case the percent identity calculated by FASTDB is not manually corrected. Once again, only residue positions outside the N- and C-terminal ends of the subject sequence, as displayed in the FASTDB alignment, which are not matched/aligned with the query sequence are manually corrected for. No other manual corrections are to be made for the purposes of the present invention.

[0127] The polynucleotide variants of the invention may contain alterations in the coding regions, non-coding regions, or both. Especially preferred are polynucleotide variants containing alterations, which produce silent substitutions, additions, or deletions, but do not alter the properties or activities of the encoded polypeptide. Nucleotide variants produced by silent substitutions due to the degeneracy of the genetic code are preferred. Moreover, polypeptide variants in which less than 50, less than 40, less than 30, less than 20, less than 10, or 5-50, 5-25, 5-10, 1-5, or 1-2 amino acids are substituted, deleted, or added in any combination are also preferred. Polynucleotide variants can be produced for a variety of reasons, e.g., to optimize codon expression for a particular host (change codons in the human mRNA to those preferred by a bacterial host such as E. coli).

[0128] Naturally occurring variants are called “allelic variants,” and refer to one of several alternate forms of a gene occupying a given locus on a chromosome of an organism. (Genes II, Lewin, B., ed., John Wiley & Sons, New York (1985).) These allelic variants can vary at either the polynucleotide and/or polypeptide level and are included in the present invention. Alternatively, non-naturally occurring variants may be produced by mutagenesis techniques or by direct synthesis.

[0129] Using known methods of protein engineering and recombinant DNA technology, variants may be generated to improve or alter the characteristics of the polypeptides of the present invention. For instance, one or more amino acids can be deleted from the N-terminus or C-terminus of the polypeptides of the present invention without substantial loss of biological function. As an example, the authors of Ron et al., J. Biol. Chem. 268: 2984-2988 (1993), reported variant KGF proteins having heparin binding activity even after deleting 3, 8, or 27 amino-terminal amino acid residues. Similarly, Interferon gamma exhibited up to ten times higher activity after deleting 8-10 amino acid residues from the carboxy terminus of this protein. (Dobeli et al., J. Biotechnology 7:199-216 (1988).)

[0130] Moreover, ample evidence demonstrates that variants often retain a biological activity similar to that of the naturally occurring protein. For example, Gayle and coworkers (J. Biol. Chem. 268:22105-22111 (1993)) conducted extensive mutational analysis of human cytokine IL-1a. They used random mutagenesis to generate over 3,500 individual IL-1a mutants that averaged 2.5 amino acid changes per variant over the entire length of the molecule. Multiple mutations were examined at every possible amino acid position. The investigators found that “[m]ost of the molecule could be altered with little effect on either [binding or biological activity].” In fact, only 23 unique amino acid sequences, out of more than 3,500 nucleotide sequences examined, produced a protein that significantly differed in activity from wild-type.

[0131] Furthermore, even if deleting one or more amino acids from the N-terminus or C-terminus of a polypeptide results in modification or loss of one or more biological functions, other biological activities may still be retained. For example, the ability of a deletion variant to induce and/or to bind antibodies which recognize the secreted form will likely be retained when less than the majority of the residues of the secreted form are removed from the N-terminus or C-terminus. Whether a particular polypeptide lacking N- or C-terminal residues of a protein retains such immunogenic activities can readily be determined by routine methods described herein and otherwise known in the art.

[0132] Thus, the invention further includes polypeptide variants which show a functional activity (e.g., biological activity) of the polypeptides of the invention. Such variants include deletions, insertions, inversions, repeats, and substitutions selected according to general rules known in the art so as have little effect on activity.

[0133] The present application is directed to nucleic acid molecules at least 80%, 85%, 90%, 95%, 96%, 97%, 98%, 99% or 100% identical to the nucleic acid sequences disclosed herein, (e.g., encoding a polypeptide having the amino acid sequence of an N and/or C terminal deletion), irrespective of whether they encode a polypeptide having functional activity. This is because even where a particular nucleic acid molecule does not encode a polypeptide having functional activity, one of skill in the art would still know how to use the nucleic acid molecule, for instance, as a hybridization probe or a polymerase chain reaction (PCR) primer. Uses of the nucleic acid molecules of the present invention that do not encode a polypeptide having functional activity include, inter alia, (1) isolating a gene or allelic or splice variants thereof in a cDNA library; (2) in situ hybridization (e.g., “FISH”) to metaphase chromosomal spreads to provide precise chromosomal location of the gene, as described in Verma et al., Human Chromosomes: A Manual of Basic Techniques, Pergamon Press, New York (1988); (3) Northern Blot analysis for detecting mRNA expression in specific tissues (e.g., normal respiratory system or diseased respiratory system tissues); and (4) in situ hybridization (e.g., histochemistry) for detecting mRNA expression in specific tissues (e.g., normal respiratory system or diseased respiratory system tissues).

[0134] Preferred, however, are nucleic acid molecules having sequences at least 80%, 85%, 90%, 95%, 96%, 97%, 98%, 99% or 100% identical to the nucleic acid sequences disclosed herein, which do, in fact, encode a polypeptide having functional activity. By a polypeptide having “functional activity” is meant, a polypeptide capable of displaying one or more known functional activities associated with a full-length (complete) protein of the invention. Such functional activities include, but are not limited to, biological activity, antigenicity [ability to bind (or compete with a polypeptide of the invention for binding) to an anti-polypeptide of the invention antibody], immunogenicity (ability to generate antibody which binds to a specific polypeptide of the invention), ability to form multimers with polypeptides of the invention, and ability to bind to a receptor or ligand for a polypeptide of the invention.

[0135] The functional activity of the polypeptides, and fragments, variants and derivatives of the invention, can be assayed by various methods.

[0136] For example, in one embodiment where one is assaying for the ability to bind or compete with full-length polypeptide of the present invention for binding to an anti-polypeptide of the invention antibody, various immunoassays known in the art can be used, including but not limited to, competitive and non-competitive assay systems using techniques such as radioimmunoassays, ELISA (enzyme linked immunosorbent assay), “sandwich” immunoassays, immunoradiometric assays, gel diffusion precipitation reactions, immunodiffusion assays, in situ immunoassays (using colloidal gold, enzyme or radioisotope labels, for example), western blots, precipitation reactions, agglutination assays (e.g., gel agglutination assays, hemagglutination assays), complement fixation assays, immunofluorescence assays, protein A assays, and immunoelectrophoresis assays, etc. In one embodiment, antibody binding is detected by detecting a label on the primary antibody. In another embodiment, the primary antibody is detected by detecting binding of a secondary antibody or reagent to the primary antibody. In a further embodiment, the secondary antibody is labeled. Many means are known in the art for detecting binding in an immunoassay and are within the scope of the present invention.

[0137] In another embodiment, where a ligand is identified, or the ability of a polypeptide fragment, variant or derivative of the invention to multimerize is being evaluated, binding can be assayed, e.g., by means well-known in the art, such as, for example, reducing and non-reducing gel chromatography, protein affinity chromatography, and affinity blotting. See generally, Phizicky et al., Microbiol. Rev. 59:94-123 (1995). In another embodiment, the ability of physiological correlates of a polypeptide of the present invention to bind to a substrate(s) of the polypeptide of the invention can be routinely assayed using techniques known in the art.

[0138] In addition, assays described herein (see Examples) and otherwise known in the art may routinely be applied to measure the ability of polypeptides of the present invention and fragments, variants and derivatives thereof to elicit polypeptide related biological activity (either in vitro or in vivo). Other methods will be known to the skilled artisan and are within the scope of the invention.

[0139] Of course, due to the degeneracy of the genetic code, one of ordinary skill in the art will immediately recognize that a large number of the nucleic acid molecules having a sequence at least 80%, 85%, 90%, 95%, 96%, 97%, 98%, 99%, or 100% identical to, for example, the nucleic acid sequence of the cDNA contained in Clone ID NO:Z, a nucleic acid sequence referred to in Table 1A (e.g., SEQ ID NO:X), a nucleic acid sequence disclosed in Table 2 (e.g., the nucleic acid sequence delineated in columns 8 and 9) or fragments thereof, will encode polypeptides “having functional activity.” In fact, since degenerate variants of any of these nucleotide sequences all encode the same polypeptide, in many instances, this will be clear to the skilled artisan even without performing the above described comparison assay. It will be further recognized in the art that, for such nucleic acid molecules that are not degenerate variants, a reasonable number will also encode a polypeptide having functional activity. This is because the skilled artisan is fully aware of amino acid substitutions that are either less likely or not likely to significantly effect protein function (e.g., replacing one aliphatic amino acid with a second aliphatic amino acid), as further described below.

[0140] For example, guidance concerning how to make phenotypically silent amino acid substitutions is provided in Bowie et al., “Deciphering the Message in Protein Sequences: Tolerance to Amino Acid Substitutions,” Science 247:1306-1310 (1990), wherein the authors indicate that there are two main strategies for studying the tolerance of an amino acid sequence to change.

[0141] The first strategy exploits the tolerance of amino acid substitutions by natural selection during the process of evolution. By comparing amino acid sequences in different species, conserved amino acids can be identified. These conserved amino acids are likely important for protein function. In contrast, the amino acid positions where substitutions have been tolerated by natural selection indicates that these positions are not critical for protein function. Thus, positions tolerating amino acid substitution could be modified while still maintaining biological activity of the protein.

[0142] The second strategy uses genetic engineering to introduce amino acid changes at specific positions of a cloned gene to identify regions critical for protein function. For example, site directed mutagenesis or alanine-scanning mutagenesis (introduction of single alanine mutations at every residue in the molecule) can be used. See Cunningham et al., Science 244:1081-1085 (1989). The resulting mutant molecules can then be tested for biological activity.

[0143] As the authors state, these two strategies have revealed that proteins are surprisingly tolerant of amino acid substitutions. The authors further indicate which amino acid changes are likely to be permissive at certain amino acid positions in the protein. For example, most buried (within the tertiary structure of the protein) amino acid residues require nonpolar side chains, whereas few features of surface side chains are generally conserved. Moreover, tolerated conservative amino acid substitutions involve replacement of the aliphatic or hydrophobic amino acids Ala, Val, Leu and Ile; replacement of the hydroxyl residues Ser and Thr; replacement of the acidic residues Asp and Glu; replacement of the amide residues Asn and Gln, replacement of the basic residues Lys, Arg, and His; replacement of the aromatic residues Phe, Tyr, and Trp, and replacement of the small-sized amino acids Ala, Ser, Thr, Met, and Gly. Besides conservative amino acid substitutions, variants of the present invention include (i) substitutions with one or more of the non-conserved amino acid residues, where the substituted amino acid residues may or may not be one encoded by the genetic code, or (ii) substitutions with one or more of the amino acid residues having a substituent group, or (iii) fusion of the mature polypeptide with another compound, such as a compound to increase the stability and/or solubility of the polypeptide (for example, polyethylene glycol), or (iv) fusion of the polypeptide with additional amino acids, such as, for example, an IgG Fc fusion region peptide, serum albumin (preferably human serum albumin) or a fragment or variant thereof, or leader or secretory sequence, or a sequence facilitating purification. Such variant polypeptides are deemed to be within the scope of those skilled in the art from the teachings herein.

[0144] For example, polypeptide variants containing amino acid substitutions of charged amino acids with other charged or neutral amino acids may produce proteins with improved characteristics, such as less aggregation. Aggregation of pharmaceutical formulations both reduces activity and increases clearance due to the aggregate's immunogenic activity. See Pinckard et al., Clin. Exp. Immunol. 2:331-340 (1967); Robbins et al., Diabetes 36: 838-845 (1987); Cleland et al., Crit. Rev. Therapeutic Drug Carrier Systems 10:307-377 (1993).

[0145] A further embodiment of the invention relates to polypeptides which comprise the amino acid sequence of a polypeptide having an amino acid sequence which contains at least one amino acid substitution, but not more than 50 amino acid substitutions, even more preferably, not more than 40 amino acid substitutions, still more preferably, not more than 30 amino acid substitutions, and still even more preferably, not more than 20 amino acid substitutions from a polypeptide sequence disclosed herein. Of course it is highly preferable for a polypeptide to have an amino acid sequence which comprises the amino acid sequence of a polypeptide of SEQ ID NO:Y, an amino acid sequence encoded by SEQ ID NO:X, an amino acid sequence encoded by the portion of SEQ ID NO:X as defined in columns 8 and 9 of Table 2, an amino acid sequence encoded by the complement of SEQ ID NO:X, and/or the amino acid sequence encoded by cDNA contained in Clone ID NO:Z which contains, in order of ever-increasing preference, at least one, but not more than 10, 9, 8, 7, 6, 5, 4, 3, 2 or 1 amino acid substitutions.

[0146] In specific embodiments, the polypeptides of the invention comprise, or alternatively, consist of, fragments or variants of a reference amino acid sequence selected from: (a) the amino acid sequence of SEQ ID NO:Y or fragments thereof (e.g., the mature form and/or other fragments described herein); (b) the amino acid sequence encoded by SEQ ID NO:X or fragments thereof; (c) the amino acid sequence encoded by the complement of SEQ ID NO:X or fragments thereof; (d) the amino acid sequence encoded by the portion of SEQ ID NO:X as defined in columns 8 and 9 of Table 2 or fragments thereof; and (e) the amino acid sequence encoded by cDNA contained in Clone ID NO:Z or fragments thereof; wherein the fragments or variants have 1-5, 5-10, 5-25, 5-50, 10-50 or 50-150, amino acid residue additions, substitutions, and/or deletions when compared to the reference amino acid sequence. In preferred embodiments, the amino acid substitutions are conservative. Polynucleotides encoding these polypeptides are also encompassed by the invention.

[0147] Polynucleotide and Polypeptide Fragments

[0148] The present invention is also directed to polynucleotide fragments of the polynucleotides (nucleic acids) of the invention. In the present invention, a “polynucleotide fragment” refers to a polynucleotide having a nucleic acid sequence which, for example: is a portion of the cDNA contained in Clone ID NO:Z or the complementary strand thereto; is a portion of the polynucleotide sequence encoding the polypeptide encoded by the cDNA contained in Clone ID NO:Z or the complementary strand thereto; is a portion of a polynucleotide sequence encoding the amino acid sequence encoded by the region of SEQ ID NO:X as defined in columns 8 and 9 of Table 2 or the complementary strand thereto; is a portion of the polynucleotide sequence of SEQ ID NO:X as defined in columns 8 and 9 of Table 2 or the complementary strand thereto; is a portion of the polynucleotide sequence in SEQ ID NO:X or the complementary strand thereto; is a polynucleotide sequence encoding a portion of the polypeptide of SEQ ID NO:Y; is a polynucleotide sequence encoding a portion of a polypeptide encoded by SEQ ID NO:X; is a polynucleotide sequence encoding a portion of a polypeptide encoded by the complement of the polynucleotide sequence in SEQ ID NO:X; is a portion of a polynucleotide sequence encoding the amino acid sequence encoded by the region of SEQ ID NO:B as defined in column 6 of Table 1B or the complementary strand thereto; or is a portion of the polynucleotide sequence of SEQ ID NO:B as defined in column 6 of Table 1B or the complementary strand thereto.

[0149] The polynucleotide fragments of the invention are preferably at least about 15 nt, and more preferably at least about 20 nt, still more preferably at least about 30 nt, and even more preferably, at least about 40 nt, at least about 50 nt, at least about 75 nt, or at least about 150 nt in length. A fragment “at least 20 nt in length,” for example, is intended to include 20 or more contiguous bases from the cDNA sequence contained in Clone ID NO:Z, or the nucleotide sequence shown in SEQ ID NO:X or the complementary stand thereto. In this context “about” includes the particularly recited value or a value larger or smaller by several (5, 4, 3, 2, or 1) nucleotides, at either terminus or at both termini. These nucleotide fragments have uses that include, but are not limited to, as diagnostic probes and primers as discussed herein. Of course, larger fragments (e.g., at least 160, 170, 180, 190, 200, 250, 500, 600, 1000, or 2000 nucleotides in length) are also encompassed by the invention.

[0150] Moreover, representative examples of polynucleotide fragments of the invention, comprise, or alternatively consist of, a sequence from about nucleotide number 1-50, 51-100, 101-150, 151-200, 201-250, 251-300, 301-350, 351-400, 401-450, 451-500, 501-550, 551-600, 651-700, 701-750, 751-800, 800-850, 851-900, 901-950, 951-1000, 1001-1050, 1051-1100, 1101-1150, 1151-1200, 1201-1250, 1251-1300, 1301-1350, 1351-1400, 1401-1450, 1451-1500, 1501-1550, 1551-1600, 1601-1650, 1651-1700, 1701-1750, 1751-1800, 1801-1850, 1851-1900, 1901-1950, 1951-2000, 2001-2050, 2051-2100, 2101-2150, 2151-2200, 2201-2250, 2251-2300, 2301-2350, 2351-2400, 2401-2450, 2451-2500, 2501-2550, 2551-2600, 2601-2650, 2651-2700, 2701-2750, 2751-2800, 2801-2850, 2851-2900, 2901-2950, 2951-3000, 3001-3050, 3051-3100, 3101-3150, 3151-3200, 3201-3250, 3251-3300, 3301-3350, 3351-3400, 3401-3450, 3451-3500, 3501-3550, 3551-3600, 3601-3650, 3651-3700, 3701-3750, 3751-3800, 3801-3850, 3851-3900, 3901-3950, 3951-4000, 4001-4050, 4051-4100, 4101-4150, 4151-4200, 4201-4250, 4251-4300, 4301-4350, 4351-4400, 4401-4450, 4451-4500, 4501-4550, 4551-4600, 4601-4650, 4651-4700, 4701-4750, 4751-4800, 4801-4850, 4851-4900, 4901-4950, 4951-5000, 5001-5050, 5051-5100, 5101-5150, 5151-5200, 5201-5250, 5251-5300, 5301-5350, 5351-5400, 5401-5450, 5451-5500, 5501-5550, 5551-5600, 5601-5650, 5651-5700, 5701-5750, 5751-5800, 5801-5850, 5851-5900, 5901-5950, 5951-6000, 6001-6050, 6051-6100, 6101-6150, 6151-6200, 6201-6250, 6251-6300, 6301-6350, 6351-6400, 6401-6450, 6451-6500, 6501-6550, 6551-6600, 6601-6650, 6651-6700, 6701-6750, 6751-6800, 6801-6850, 6851-6900, 6901-6950, 6951-7000, 7001-7050, 7051-7100, 7101-7150, 7151-7200, 7201-7250, 7251-7300 or 7301 to the end of SEQ ID NO:X, or the complementary strand thereto. In this context “about” includes the particularly recited range or a range larger or smaller by several (5, 4, 3, 2, or 1) nucleotides, at either terminus or at both termini. Preferably, these fragments encode a polypeptide which has a functional activity (e.g., biological activity). More preferably, these polynucleotides can be used as probes or primers as discussed herein. Polynucleotides which hybridize to one or more of these polynucleotides under stringent hybridization conditions or alternatively, under lower stringency conditions are also encompassed by the invention, as are polypeptides encoded by these polynucleotides.

[0151] Further representative examples of polynucleotide fragments of the invention, comprise, or alternatively consist of, a sequence from about nucleotide number 1-50, 51-100, 101-150, 151-200, 201-250, 251-300, 301-350, 351-400, 401-450, 451-500, 501-550, 551-600, 651-700, 701-750, 751-800, 800-850, 851-900, 901-950, 951-1000, 1001-1050, 1051-1100, 1101-1150, 1151-1200, 1201-1250, 1251-1300, 1301-1350, 1351-1400, 1401-1450, 1451-1500, 1501-1550, 1551-1600, 1601-1650, 1651-1700, 1701-1750, 1751-1800, 1801-1850, 1851-1900, 1901-1950, 1951-2000, 2001-2050, 2051-2100, 2101-2150, 2151-2200, 2201-2250, 2251-2300, 2301-2350, 2351-2400, 2401-2450, 2451-2500, 2501-2550, 2551-2600, 2601-2650, 2651-2700, 2701-2750, 2751-2800, 2801-2850, 2851-2900, 2901-2950, 2951-3000, 3001-3050, 3051-3100, 3101-3150, 3151-3200, 3201-3250, 3251-3300, 3301-3350, 3351-3400, 3401-3450, 3451-3500, 3501-3550, 3551-3600, 3601-3650, 3651-3700, 3701-3750, 3751-3800, 3801-3850, 3851-3900, 3901-3950, 3951-4000, 4001-4050, 4051-4100, 4101-4150, 4151-4200, 4201-4250, 4251-4300, 4301-4350, 4351-4400, 4401-4450, 4451-4500, 4501-4550, 4551-4600, 4601-4650, 4651-4700, 4701-4750, 4751-4800, 4801-4850, 4851-4900, 4901-4950, 4951-5000, 5001-5050, 5051-5100, 5101-5150, 5151-5200, 5201-5250, 5251-5300, 5301-5350, 5351-5400, 5401-5450, 5451-5500, 5501-5550, 5551-5600, 5601-5650, 5651-5700, 5701-5750, 5751-5800, 5801-5850, 5851-5900, 5901-5950, 5951-6000, 6001-6050, 6051-6100, 6101-6150, 6151-6200, 6201-6250, 6251-6300, 6301-6350, 6351-6400, 6401-6450, 6451-6500, 6501-6550, 6551-6600, 6601-6650, 6651-6700, 6701-6750, 6751-6800, 6801-6850, 6851-6900, 6901-6950, 6951-7000, 7001-7050, 7051-7100, 7101-7150, 7151-7200, 7201-7250, 7251-7300 or 7301 to the end of the cDNA sequence contained in Clone ID NO:Z, or the complementary strand thereto. In this context “about” includes the particularly recited range or a range larger or smaller by several (5, 4, 3, 2, or 1) nucleotides, at either terminus or at both termini. Preferably, these fragments encode a polypeptide, which has a functional activity (e.g., biological activity). More preferably, these polynucleotides can be used as probes or primers as discussed herein. Polynucleotides which hybridize to one or more of these polynucleotides under stringent hybridization conditions or alternatively, under lower stringency conditions are also encompassed by the invention, as are polypeptides encoded by these polynucleotides.

[0152] Moreover, representative examples of polynucleotide fragments of the invention comprise, or alternatively consist of, a nucleic acid sequence comprising one, two, three, four, five, six, seven, eight, nine, ten, or more of the above described polynucleotide fragments of the invention in combination with a polynucleotide sequence delineated in Table 1B column 6. Additional, representative examples of polynucleotide fragments of the invention comprise, or alternatively consist of, a nucleic acid sequence comprising one, two, three, four, five, six, seven, eight, nine, ten, or more of the above described polynucleotide fragments of the invention in combination with a polynucleotide sequence that is the complementary strand of a sequence delineated in column 6 of Table 1B. In further embodiments, the above-described polynucleotide fragments of the invention comprise, or alternatively consist of, sequences delineated in Table 1B, column 6, and have a nucleic acid sequence which is different from that of the BAC fragment having the sequence disclosed in SEQ ID NO:B (see Table 1B, column 5). In additional embodiments, the above-described polynucleotide fragments of the invention comprise, or alternatively consist of, sequences delineated in Table 1B, column 6, and have a nucleic acid sequence which is different from that published for the BAC clone identified as BAC ID NO:A (see Table 1B, column 4). In additional embodiments, the above-described polynucleotides of the invention comprise, or alternatively consist of, sequences delineated Table 1B, column 6, and have a nucleic acid sequence which is different from that contained in the BAC clone identified as BAC ID NO:A (see Table 1B, column 4). Polypeptides encoded by these polynucleotides, other polynucleotides that encode these polypeptides, and antibodies that bind these polypeptides are also encompassed by the invention. Additionally, fragments and variants of the above-described polynucleotides and polypeptides are also encompassed by the invention.

[0153] In additional specific embodiments, polynucleotides of the invention comprise, or alternatively consist of, one, two, three, four, five, six, seven, eight, nine, ten, or more fragments of the sequences delineated in column 6 of Table 1B, and the polynucleotide sequence of SEQ ID NO:X (e.g., as defined in Table 1B, column 2) or fragments or variants thereof. Polypeptides encoded by these polynucleotides, other polynucleotides that encode these polypeptides, and antibodies that bind these polypeptides are also encompassed by the invention.

[0154] In additional specific embodiments, polynucleotides of the invention comprise, or alternatively consist of, one, two, three, four, five, six, seven, eight, nine, ten, or more fragments of the sequences delineated in column 6 of Table 1B which correspond to the same Clone ID NO:Z (see Table 1B, column 1), and the polynucleotide sequence of SEQ ID NO:X (e.g., as defined in Table 1A or 1B) or fragments or variants thereof. Polypeptides encoded by these polynucleotides, other polynucleotides that encode these polypeptides, and antibodies that bind these polypeptides are also encompassed by the invention.

[0155] In further specific embodiments, polynucleotides of the invention comprise, or alternatively consist of, one, two, three, four, five, six, seven, eight, nine, ten, or more fragments of the sequences delineated in the same row of column 6 of Table 1B, and the polynucleotide sequence of SEQ ID NO:X (e.g., as defined in Table 1A or 1B) or fragments or variants thereof. Polypeptides encoded by these polynucleotides, other polynucleotides that encode these polypeptides, and antibodies that bind these polypeptides are also encompassed by the invention.

[0156] In additional specific embodiments, polynucleotides of the invention comprise, or alternatively consist of a polynucleotide sequence in which the 3′ 10 polynucleotides of one of the sequences delineated in column 6 of Table 1B and the 5′ 10 polynucleotides of the sequence of SEQ ID NO:X are directly contiguous. Nucleic acids which hybridize to the complement of these 20 contiguous polynucleotides under stringent hybridization conditions or alternatively, under lower stringency conditions, are also encompassed by the invention. Polypeptides encoded by these polynucleotides and/or nucleic acids, other polynucleotides and/or nucleic acids that encode these polypeptides, and antibodies that bind these polypeptides are also encompassed by the invention. Additionally, fragments and variants of the above-described polynucleotides, nucleic acids, and polypeptides are also encompassed by the invention.

[0157] In additional specific embodiments, polynucleotides of the invention comprise, or alternatively consist of a polynucleotide sequence in which the 3′ 10 polynucleotides of one of the sequences delineated in column 6 of Table 1B and the 5′ 10 polynucleotides of a fragment or variant of the sequence of SEQ ID NO:X (e.g., as described herein) are directly contiguous Nucleic acids which hybridize to the complement of these 20 contiguous polynucleotides under stringent hybridization conditions or alternatively, under lower stringency conditions, are also encompassed by the invention. Polypeptides encoded by these polynucleotides and/or nucleic acids, other polynucleotides and/or nucleic acids encoding these polypeptides, and antibodies that bind these polypeptides are also encompassed by the invention. Additionally, fragments and variants of the above-described polynucleotides, nucleic acids, and polypeptides are also encompassed by the invention.

[0158] In further specific embodiments, polynucleotides of the invention comprise, or alternatively consist of a polynucleotide sequence in which the 3′ 10 polynucleotides of a fragment or variant of the sequence of SEQ ID NO:X and the 5′ 10 polynucleotides of the sequence of one of the sequences delineated in column 6 of Table 1B are directly contiguous. Nucleic acids which hybridize to the complement of these 20 contiguous polynucleotides under stringent hybridization conditions or alternatively, under lower stringency conditions, are also encompassed by the invention. Polypeptides encoded by these polynucleotides and/or nucleic acids, other polynucleotides and/or nucleic acids encoding these polypeptides, and antibodies that bind these polypeptides are also encompassed by the invention. Additionally, fragments and variants of the above-described polynucleotides, nucleic acids, and polypeptides are also encompassed by the invention.

[0159] In specific embodiments, polynucleotides of the invention comprise, or alternatively consist of a polynucleotide sequence in which the 3′ 10 polynucleotides of one of the sequences delineated in column 6 of Table 1B and the 5′ 10 polynucleotides of another sequence in column 6 are directly contiguous. In preferred embodiments, the 3′ 10 polynucleotides of one of the sequences delineated in column 6 of Table 1B is directly contiguous with the 5′ 10 polynucleotides of the next sequential exon delineated in Table 1B, column 6. Nucleic acids which hybridize to the complement of these 20 contiguous polynucleotides under stringent hybridization conditions or alternatively, under lower stringency conditions, are also encompassed by the invention. Polypeptides encoded by these polynucleotides and/or nucleic acids, other polynucleotides and/or nucleic acids encoding these polypeptides, and antibodies that bind these polypeptides are also encompassed by the invention. Additionally, fragments and variants of the above-described polynucleotides, nucleic acids, and polypeptides are also encompassed by the invention.

[0160] In the present invention, a “polypeptide fragment” refers to an amino acid sequence which is a portion of that contained in SEQ ID NO:Y, a portion of an amino acid sequence encoded by the portion of SEQ ID NO:X as defined in columns 8 and 9 of Table 2, a portion of an amino acid sequence encoded by the polynucleotide sequence of SEQ ID NO:X, a portion of an amino acid sequence encoded by the complement of the polynucleotide sequence in SEQ ID NO:X, and/or a portion of an amino acid sequence encoded by the cDNA contained in Clone ID NO:Z. Protein (polypeptide) fragments may be “free-standing,” or comprised within a larger polypeptide of which the fragment forms a part or region, most preferably as a single continuous region. Representative examples of polypeptide fragments of the invention, include, for example, fragments comprising, or alternatively consisting of, from about amino acid number 1-20, 21-40, 41-60, 61-80, 81-100, 102-120, 121-140, 141-160, 161-180, 181-200, 201-220, 221-240, 241-260, 261-280, 281-300, 301-320, 321-340, 341-360, 361-380, 381-400, 401-420, 421-440, 441-460, 461-480, 481-500, 501-520, 521-540, 541-560, 561-580, 581-600, 601-620, 621-640, 641-660, 661-680, 681-700, 701-720, 721-740, 741-760, 761-780, 781-800, 801-820, 821-840, 841-860, 861-880, 881-900, 901-920, 921-940, 941-960, 961-980, 981-1000, 1001-1020, 1021-1040, 1041-1060, 1061-1080, 1081-1100, 1101-1120, 1121-1140, 1141-1160, 1161-1180, 1181-1200, 1201-1220, 1221-1240, 1241-1260, 1261-1280, 1281-1300, 1301-1320, 1321-1340, 1341-1360, 1361-1380, 1381-1400, 1401-1420, 1421-1440, or 1441 to the end of the coding region. In a preferred embodiment, polypeptide fragments of the invention include, for example, fragments comprising, or alternatively consisting of, from about amino acid number 1-20, 21-40, 41-60, 61-80, 81-100, 102-120, 121-140, 141-160, 161-180, 181-200, 201-220, 221-240, 241-260, 261-280, 281-300, 301-320, 321-340, 341-360, 361-380, 381-400, 401-420, 421-440, 441-460, 461-480, 481-500, 501-520, 521-540, 541-560, 561-580, 581-600, 601-620, 621-640, 641-660, 661-680, 681-700, 701-720, 721-740, 741-760, 761-780, 781-800, 801-820, 821-840, 841-860, 861-880, 881-900, 901-920, 921-940, 941-960, 961-980, 981-1000, 1001-1020, 1021-1040, 1041-1060, 1061-1080, 1081-1100, 1101-1120, 1121-1140, 1141-1160, 1161-1180, 1181-1200, 1201-1220, 1221-1240, 1241-1260, 1261-1280, 1281-1300, 1301-1320, 1321-1340, 1341-1360, 1361-1380, 1381-1400, 1401-1420, 1421-1440, or 1441 to the end of the coding region of SEQ ID NO:Y. Moreover, polypeptide fragments of the invention may be at least about 10, 15, 20, 25, 30, 35, 40, 45, 50, 55, 60, 65, 70, 75, 80, 85, 90, 100, 110, 120, 130, 140, or 150 amino acids in length. In this context “about” includes the particularly recited ranges or values, or ranges or values larger or smaller by several (5, 4, 3, 2, or 1) amino acids, at either extreme or at both extremes. Polynucleotides encoding these polypeptide fragments are also encompassed by the invention.

[0161] Even if deletion of one or more amino acids from the N-terminus of a protein results in modification of loss of one or more biological functions of the protein, other functional activities (e.g., biological activities, ability to multimerize, ability to bind a ligand) may still be retained. For example, the ability of shortened muteins to induce and/or bind to antibodies which recognize the complete or mature forms of the polypeptides generally will be retained when less than the majority of the residues of the complete or mature polypeptide are removed from the N-terminus. Whether a particular polypeptide lacking N-terminal residues of a complete polypeptide retains such immunologic activities can readily be determined by routine methods described herein and otherwise known in the art. It is not unlikely that a mutein with a large number of deleted N-terminal amino acid residues may retain some biological or immunogenic activities. In fact, peptides composed of as few as six amino acid residues may often evoke an immune response.

[0162] Accordingly, polypeptide fragments include the secreted protein as well as the mature form. Further preferred polypeptide fragments include the secreted protein or the mature form having a continuous series of deleted residues from the amino or the carboxy terminus, or both. For example, any number of amino acids, ranging from 1-60, can be deleted from the amino terminus of either the secreted polypeptide or the mature form. Similarly, any number of amino acids, ranging from 1-30, can be deleted from the carboxy terminus of the secreted protein or mature form. Furthermore, any combination of the above amino and carboxy terminus deletions is preferred. Similarly, polynucleotides encoding these polypeptide fragments are also preferred.

[0163] The present invention further provides polypeptides having one or more residues deleted from the amino terminus of the amino acid sequence of a polypeptide disclosed herein (e.g., a polypeptide of SEQ ID NO:Y, a polypeptide encoded by the polynucleotide sequence contained in SEQ ID NO:X or the complement thereof, a polypeptide encoded by the portion of SEQ ID NO:X as defined in columns 8 and 9 of Table 2, a polypeptide encoded by the portion of SEQ ID NO:B as defined in column 6 of Table 1B, and/or a polypeptide encoded by the cDNA contained in Clone ID NO:Z). In particular, N-terminal deletions may be described by the general formula m-q, where q is a whole integer representing the total number of amino acid residues in a polypeptide of the invention (e.g., the polypeptide disclosed in SEQ ID NO:Y, or the polypeptide encoded by the portion of SEQ ID NO:X as defined in columns 8 and 9 of Table 2), and m is defined as any integer ranging from 2 to q−6. Polynucleotides encoding these polypeptides are also encompassed by the invention.

[0164] The present invention further provides polypeptides having one or more residues from the carboxy terminus of the amino acid sequence of a polypeptide disclosed herein (e.g., a polypeptide of SEQ ID NO:Y, a polypeptide encoded by the polynucleotide sequence contained in SEQ ID NO:X, a polypeptide encoded by the portion of SEQ ID NO:X as defined in columns 8 and 9 of Table 2, and/or a polypeptide encoded by the cDNA contained in Clone ID NO:Z). In particular, C-terminal deletions may be described by the general formula 1−n, where n is any whole integer ranging from 6 to q−1, and where n corresponds to the position of amino acid residue in a polypeptide of the invention. Polynucleotides encoding these polypeptides are also encompassed by the invention.

[0165] In addition, any of the above described N- or C-terminal deletions can be combined to produce a N- and C-terminal deleted polypeptide. The invention also provides polypeptides having one or more amino acids deleted from both the amino and the carboxyl termini, which may be described generally as having residues m-n of a polypeptide encoded by SEQ ID NO:X (e.g., including, but not limited to, the preferred polypeptide disclosed as SEQ ID NO:Y and the polypeptide encoded by the portion of SEQ ID NO:X as defined in columns 8 and 9 of Table 2), the cDNA contained in Clone ID NO:Z, and/or the complement thereof, where n and m are integers as described above. Polynucleotides encoding these polypeptides are also encompassed by the invention.

[0166] Also as mentioned above, even if deletion of one or more amino acids from the C-terminus of a protein results in modification of loss of one or more biological functions of the protein, other functional activities (e.g., biological activities, ability to multimerize, ability to bind a ligand) may still be retained. For example the ability of the shortened mutein to induce and/or bind to antibodies which recognize the complete or mature forms of the polypeptide generally will be retained when less than the majority of the residues of the complete or mature polypeptide are removed from the C-terminus. Whether a particular polypeptide lacking C-terminal residues of a complete polypeptide retains such immunologic activities can readily be determined by routine methods described herein and otherwise known in the art. It is not unlikely that a mutein with a large number of deleted C-terminal amino acid residues may retain some biological or immunogenic activities. In fact, peptides composed of as few as six amino acid residues may often evoke an immune response.

[0167] The present application is also directed to proteins containing polypeptides at least 80%, 85%, 90%, 95%, 96%, 97%, 98% or 99% identical to a polypeptide sequence set forth herein. In preferred embodiments, the application is directed to proteins containing polypeptides at least 80%, 85%, 90%, 95%, 96%, 97%, 98% or 99% identical to polypeptides having the amino acid sequence of the specific N- and C-terminal deletions. Polynucleotides encoding these polypeptides are also encompassed by the invention.

[0168] Any polypeptide sequence encoded by, for example, the polynucleotide sequences set forth as SEQ ID NO:X or the complement thereof, (presented, for example, in Tables 1A and 2), the cDNA contained in Clone ID NO:Z, or the polynucleotide sequence as defined in column 6 of Table 1B, may be analyzed to determine certain preferred regions of the polypeptide. For example, the amino acid sequence of a polypeptide encoded by a polynucleotide sequence of SEQ ID NO:X (e.g., the polypeptide of SEQ ID NO:Y and the polypeptide encoded by the portion of SEQ ID NO:X as defined in columns 8 and 9 of Table 2) or the cDNA contained in Clone ID NO:Z may be analyzed using the default parameters of the DNASTAR computer algorithm (DNASTAR, Inc., 1228 S. Park St., Madison, Wis. 53715 USA; http://www.dnastar.com/).

[0169] Polypeptide regions that may be routinely obtained using the DNASTAR computer algorithm include, but are not limited to, Garnier-Robson alpha-regions, beta-regions, turn-regions, and coil-regions; Chou-Fasman alpha-regions, beta-regions, and turn-regions; Kyte-Doolittle hydrophilic regions and hydrophobic regions; Eisenberg alpha- and beta-amphipathic regions; Karplus-Schulz flexible regions; Emini surface-forming regions; and Jameson-Wolf regions of high antigenic index. Among highly preferred polynucleotides of the invention in this regard are those that encode polypeptides comprising regions that combine several structural features, such as several (e.g., 1, 2, 3 or 4) of the features set out above.

[0170] Additionally, Kyte-Doolittle hydrophilic regions and hydrophobic regions, Emini surface-forming regions, and Jameson-Wolf regions of high antigenic index (i.e., containing four or more contiguous amino acids having an antigenic index of greater than or equal to 1.5, as identified using the default parameters of the Jameson-Wolf program) can routinely be used to determine polypeptide regions that exhibit a high degree of potential for antigenicity. Regions of high antigenicity are determined from data by DNASTAR analysis by choosing values which represent regions of the polypeptide which are likely to be exposed on the surface of the polypeptide in an environment in which antigen recognition may occur in the process of initiation of an immune response.

[0171] Preferred polypeptide fragments of the invention are fragments comprising, or alternatively, consisting of, an amino acid sequence that displays a functional activity (e.g. biological activity) of the polypeptide sequence of which the amino acid sequence is a fragment. By a polypeptide displaying a “functional activity” is meant a polypeptide capable of one or more known functional activities associated with a full-length protein, such as, for example, biological activity, antigenicity, immunogenicity, and/or multimerization, as described herein.

[0172] Other preferred polypeptide fragments are biologically active fragments. Biologically active fragments are those exhibiting activity similar, but not necessarily identical, to an activity of the polypeptide of the present invention. The biological activity of the fragments may include an improved desired activity, or a decreased undesirable activity.

[0173] In preferred embodiments, polypeptides of the invention comprise, or alternatively consist of, one, two, three, four, five or more of the antigenic fragments of the polypeptide of SEQ ID NO:Y, or portions thereof. Polynucleotides encoding these polypeptides are also encompassed by the invention.

[0174] The present invention encompasses polypeptides comprising, or alternatively consisting of, an epitope of: the polypeptide sequence shown in SEQ ID NO:Y; a polypeptide sequence encoded by SEQ ID NO:X or the complementary strand thereto; the polypeptide sequence encoded by the portion of SEQ ID NO:X as defined in columns 8 and 9 of Table 2; the polypeptide sequence encoded by the portion of SEQ ID NO:B as defined in column 6 of Table 1B or the complement thereto; the polypeptide sequence encoded by the cDNA contained in Clone ID NO:Z; or the polypeptide sequence encoded by a polynucleotide that hybridizes to the sequence of SEQ ID NO:X, the complement of the sequence of SEQ ID NO:X, the complement of a portion of SEQ ID NO:X as defined in columns 8 and 9 of Table 2, or the cDNA sequence contained in Clone ID NO:Z under stringent hybridization conditions or alternatively, under lower stringency hybridization as defined supra. The present invention further encompasses polynucleotide sequences encoding an epitope of a polypeptide sequence of the invention (such as, for example, the sequence disclosed in SEQ ID NO:X, or a fragment thereof), polynucleotide sequences of the complementary strand of a polynucleotide sequence encoding an epitope of the invention, and polynucleotide sequences which hybridize to the complementary strand under stringent hybridization conditions or alternatively, under lower stringency hybridization conditions defined supra.

[0175] The term “epitopes,” as used herein, refers to portions of a polypeptide having antigenic or immunogenic activity in an animal, preferably a mammal, and most preferably in a human. In a preferred embodiment, the present invention encompasses a polypeptide comprising an epitope, as well as the polynucleotide encoding this polypeptide. An “immunogenic epitope,” as used herein, is defined as a portion of a protein that elicits an antibody response in an animal, as determined by any method known in the art, for example, by the methods for generating antibodies described infra. (See, for example, Geysen et al., Proc. Natl. Acad. Sci. USA 81:3998-4002 (1983)). The term “antigenic epitope,” as used herein, is defined as a portion of a protein to which an antibody can immunospecifically bind its antigen as determined by any method well known in the art, for example, by the immunoassays described herein. Immunospecific binding excludes non-specific binding but does not necessarily exclude cross-reactivity with other antigens. Antigenic epitopes need not necessarily be immunogenic.

[0176] Fragments, which function as epitopes may be produced by any conventional means. (See, e.g., Houghten, R. A., Proc. Natl. Acad. Sci. USA 82:5131-5135 (1985) further described in U.S. Pat. No. 4,631,211.)

[0177] In the present invention, antigenic epitopes preferably contain a sequence of at least 4, at least 5, at least 6, at least 7, more preferably at least 8, at least 9, at least 10, at least 11, at least 12, at least 13, at least 14, at least 15, at least 20, at least 25, at least 30, at least 40, at least 50, and, most preferably, between about 15 to about 30 amino acids. Preferred polypeptides comprising immunogenic or antigenic epitopes are at least 10, 15, 20, 25, 30, 35, 40, 45, 50, 55, 60, 65, 70, 75, 80, 85, 90, 95, or 100 amino acid residues in length. Additional non-exclusive preferred antigenic epitopes include the antigenic epitopes disclosed herein, as well as portions thereof. Antigenic epitopes are useful, for example, to raise antibodies, including monoclonal antibodies, that specifically bind the epitope. Preferred antigenic epitopes include the antigenic epitopes disclosed herein, as well as any combination of two, three, four, five or more of these antigenic epitopes. Antigenic epitopes can be used as the target molecules in immunoassays. (See, for instance, Wilson et al., Cell 37:767-778 (1984); Sutcliffe et al., Science 219:660-666 (1983)).

[0178] Non-limiting examples of epitopes of polypeptides that can be used to generate antibodies of the invention include a polypeptide comprising, or alternatively consisting of, at least one, two, three, four, five, six or more of the portion(s) of SEQ ID NO:Y specified in column 6 of Table 1A. These polypeptide fragments have been determined to bear antigenic epitopes of the proteins of the invention by the analysis of the Jameson-Wolf antigenic index, which is included in the DNAStar suite of computer programs. By “comprise” it is intended that a polypeptide contains at least one, two, three, four, five, six or more of the portion(s) of SEQ ID NO:Y shown in column 6 of Table 1A, but it may contain additional flanking residues on either the amino or carboxyl termini of the recited portion. Such additional flanking sequences are preferably sequences naturally found adjacent to the portion; i.e., contiguous sequence shown in SEQ ID NO:Y. The flanking sequence may, however, be sequences from a heterologous polypeptide, such as from another protein described herein or from a heterologous polypeptide not described herein. In particular embodiments, epitope portions of a polypeptide of the invention comprise one, two, three, or more of the portions of SEQ ID NO:Y shown in column 6 of Table 1A. Polynucleotides encoding these polypeptides are also encompassed by the invention.

[0179] Similarly, immunogenic epitopes can be used, for example, to induce antibodies according to methods well known in the art. See, for instance, Sutcliffe et al., supra; Wilson et al., supra; Chow et al., Proc. Natl. Acad. Sci. USA 82:910-914; and Bittle et al., J. Gen. Virol. 66:2347-2354 (1985). Preferred immunogenic epitopes include the immunogenic epitopes disclosed herein, as well as any combination of two, three, four, five or more of these immunogenic epitopes. The polypeptides comprising one or more immunogenic epitopes may be presented for eliciting an antibody response together with a carrier protein, such as an albumin, to an animal system (such as rabbit or mouse), or, if the polypeptide is of sufficient length (at least about 25 amino acids), the polypeptide may be presented without a carrier. However, immunogenic epitopes comprising as few as 8 to 10 amino acids have been shown to be sufficient to raise antibodies capable of binding to, at the very least, linear epitopes in a denatured polypeptide (e.g., in Western blotting).

[0180] Epitope-bearing polypeptides of the present invention may be used to induce antibodies according to methods well known in the art including, but not limited to, in vivo immunization, in vitro immunization, and phage display methods. See, e.g., Sutcliffe et al., supra; Wilson et al., supra, and Bittle et al., J. Gen. Virol., 66:2347-2354 (1985). If in vivo immunization is used, animals may be immunized with free peptide; however, anti-peptide antibody titer may be boosted by coupling the peptide to a macromolecular carrier, such as keyhole limpet hemacyanin (KLH) or tetanus toxoid. For instance, peptides containing cysteine residues may be coupled to a carrier using a linker such as maleimidobenzoyl-N-hydroxysuccinimide ester (MBS), while other peptides may be coupled to carriers using a more general linking agent such as glutaraldehyde. Animals such as rabbits, rats and mice are immunized with either free or carrier-coupled peptides, for instance, by intraperitoneal and/or intradermal injection of emulsions containing about 100 μg of peptide or carrier protein and Freund's adjuvant or any other adjuvant known for stimulating an immune response. Several booster injections may be needed, for instance, at intervals of about two weeks, to provide a useful titer of anti-peptide antibody which can be detected, for example, by ELISA assay using free peptide adsorbed to a solid surface. The titer of anti-peptide antibodies in serum from an immunized animal may be increased by selection of anti-peptide antibodies, for instance, by adsorption to the peptide on a solid support and elution of the selected antibodies according to methods well known in the art.

[0181] As one of skill in the art will appreciate, and as discussed above, the polypeptides of the present invention (e.g., those comprising an immunogenic or antigenic epitope) can be fused to heterologous polypeptide sequences. For example, polypeptides of the present invention (including fragments or variants thereof), may be fused with the constant domain of immunoglobulins (IgA, IgE, IgG, IgM), or portions thereof (CH1, CH2, CH3, or any combination thereof and portions thereof, resulting in chimeric polypeptides. By way of another non-limiting example, polypeptides and/or antibodies of the present invention (including fragments or variants thereof) may be fused with albumin (including but not limited to recombinant human serum albumin or fragments or variants thereof (see, e.g., U.S. Pat. No. 5,876,969, issued Mar. 2, 1999, EP Patent 0 413 622, and U.S. Pat. No. 5,766,883, issued Jun. 16, 1998, herein incorporated by reference in their entirety)). In a preferred embodiment, polypeptides and/or antibodies of the present invention (including fragments or variants thereof) are fused with the mature form of human serum albumin (i.e., amino acids 1-585 of human serum albumin as shown in FIGS. 1 and 2 of EP Patent 0 322 094) which is herein incorporated by reference in its entirety. In another preferred embodiment, polypeptides and/or antibodies of the present invention (including fragments or variants thereof) are fused with polypeptide fragments comprising, or alternatively consisting of, amino acid residues 1−z of human serum albumin, where z is an integer from 369 to 419, as described in U.S. Pat. No. 5,766,883 herein incorporated by reference in its entirety. Polypeptides and/or antibodies of the present invention (including fragments or variants thereof) may be fused to either the N- or C-terminal end of the heterologous protein (e.g., immunoglobulin Fc polypeptide or human serum albumin polypeptide). Polynucleotides encoding fusion proteins of the invention are also encompassed by the invention.

[0182] Such fusion proteins as those described above may facilitate purification and may increase half-life in vivo. This has been shown for chimeric proteins consisting of the first two domains of the human CD4-polypeptide and various domains of the constant regions of the heavy or light chains of mammalian immunoglobulins. See, e.g., EP 394,827; Traunecker et al., Nature, 331:84-86 (1988). Enhanced delivery of an antigen across the epithelial barrier to the immune system has been demonstrated for antigens (e.g., insulin) conjugated to an FcRn binding partner such as IgG or Fe fragments (see, e.g., PCT Publications WO 96/22024 and WO 99/04813). IgG Fusion proteins that have a disulfide-linked dimeric structure due to the IgG portion desulfide bonds have also been found to be more efficient in binding and neutralizing other molecules than monomeric polypeptides or fragments thereof alone. See, e.g., Fountoulakis et al., J. Biochem., 270:3958-3964 (1995). Nucleic acids encoding the above epitopes can also be recombined with a gene of interest as an epitope tag (e.g., the hemagglutinin (HA) tag or flag tag) to aid in detection and purification of the expressed polypeptide. For example, a system described by Janknecht et al. allows for the ready purification of non-denatured fusion proteins expressed in human cell lines (Janknecht et al., 1991, Proc. Natl. Acad. Sci. USA 88:8972-897). In this system, the gene of interest is subcloned into a vaccinia recombination plasmid such that the open reading frame of the gene is translationally fused to an amino-terminal tag consisting of six histidine residues. The tag serves as a matrix binding domain for the fusion protein. Extracts from cells infected with the recombinant vaccinia virus are loaded onto Ni2+ nitriloacetic acid-agarose column and histidine-tagged proteins can be selectively eluted with imidazole-containing buffers.

[0183] Fusion Proteins

[0184] Any polypeptide of the present invention can be used to generate fusion proteins. For example, the polypeptide of the present invention, when fused to a second protein, can be used as an antigenic tag. Antibodies raised against the polypeptide of the present invention can be used to indirectly detect the second protein by binding to the polypeptide. Moreover, because secreted proteins target cellular locations based on trafficking signals, polypeptides of the present invention which are shown to be secreted can be used as targeting molecules once fused to other proteins.

[0185] Examples of domains that can be fused to polypeptides of the present invention include not only heterologous signal sequences, but also other heterologous functional regions. The fusion does not necessarily need to be direct, but may occur through linker sequences.

[0186] In certain preferred embodiments, proteins of the invention are fusion proteins comprising an amino acid sequence that is an N and/or C-terminal deletion of a polypeptide of the invention. In preferred embodiments, the invention is directed to a fusion protein comprising an amino acid sequence that is at least 80%, 85%, 90%, 95%, 96%, 97%, 98% or 99% identical to a polypeptide sequence of the invention. Polynucleotides encoding these proteins are also encompassed by the invention.

[0187] Moreover, fusion proteins may also be engineered to improve characteristics of the polypeptide of the present invention. For instance, a region of additional amino acids, particularly charged amino acids, may be added to the N-terminus of the polypeptide to improve stability and persistence during purification from the host cell or subsequent handling and storage. Also, peptide moieties may be added to the polypeptide to facilitate purification. Such regions may be removed prior to final preparation of the polypeptide. The addition of peptide moieties to facilitate handling of polypeptides are familiar and routine techniques in the art.

[0188] As one of skill in the art will appreciate that, as discussed above, polypeptides of the present invention, and epitope-bearing fragments thereof, can be combined with heterologous polypeptide sequences. For example, the polypeptides of the present invention may be fused with heterologous polypeptide sequences, for example, the polypeptides of the present invention may be fused with the constant domain of immunoglobulins (IgA, IgE, IgG, IgM) or portions thereof (CH1, CH2, CH3, and any combination thereof, including both entire domains and portions thereof), or albumin (including, but not limited to, native or recombinant human albumin or fragments or variants thereof (see, e.g., U.S. Pat. No. 5,876,969, issued Mar. 2, 1999, EP Patent 0 413 622, and U.S. Pat. No. 5,766,883, issued Jun. 16, 1998, herein incorporated by reference in their entirety)), resulting in chimeric polypeptides. For example, EP-A-O 464 533 (Canadian counterpart 2045869) discloses fusion proteins comprising various portions of constant region of immunoglobulin molecules together with another human protein or part thereof. In many cases, the Fe part in a fusion protein is beneficial in therapy and diagnosis, and thus can result in, for example, improved pharmacokinetic properties (EP-A 0232 262). Alternatively, deleting the Fc part after the fusion protein has been expressed, detected, and purified, would be desired. For example, the Fc portion may hinder therapy and diagnosis if the fusion protein is used as an antigen for immunizations. In drug discovery, for example, human proteins, such as hIL-5, have been fused with Fc portions for the purpose of high-throughput screening assays to identify antagonists of hIL-5. See, D. Bennett et al., J. Molecular Recognition 8:52-58 (1995); K. Johanson et al., J. Biol. Chem. 270:9459-9471 (1995).

[0189] Moreover, the polypeptides of the present invention can be fused to marker sequences, such as a polypeptide which facilitates purification of the fused polypeptide. In preferred embodiments, the marker amino acid sequence is a hexa-histidine peptide, such as the tag provided in a pQE vector (QIAGEN, Inc., 9259 Eton Avenue, Chatsworth, Calif., 91311), among others, many of which are commercially available. As described in Gentz et al., Proc. Natl. Acad. Sci. USA 86:821-824 (1989), for instance, hexa-histidine provides for convenient purification of the fusion protein. Another peptide tag useful for purification, the “HA” tag, corresponds to an epitope derived from the influenza hemagglutinin protein (Wilson et al., Cell 37:767 (1984).)

[0190] Additional fusion proteins of the invention may be generated through the techniques of gene-shuffling, motif-shuffling, exon-shuffling, and/or codon-shuffling (collectively referred to as “DNA shuffling”), briefly described below, and further described herein. DNA shuffling may be employed to modulate the activities of polypeptides of the invention, such methods can be used to generate polypeptides with altered activity, as well as agonists and antagonists of the polypeptides. See, generally, U.S. Pat. Nos. 5,605,793; 5,811,238; 5,830,721; 5,834,252; and 5,837,458, and Patten et al., Curr. Opinion Biotechnol. 8:724-33 (1997); Harayama, Trends Biotechnol. 16(2):76-82 (1998); Hansson et al., J. Mol. Biol. 287:265-76 (1999); and Lorenzo and Blasco, Biotechniques 24(2):308-13 (1998); each of these patents and publications are hereby incorporated by reference in its entirety). In a preferred embodiment, one or more components, motifs, sections, parts, domains, fragments, etc., of a polynucleotide encoding a polypeptide of the invention may be recombined with one or more components, motifs, sections, parts, domains, fragments, etc., of one or more heterologous molecules encoding a heterologous polypeptide.

[0191] Thus, any of these above fusions can be engineered using the polynucleotides or the polypeptides of the present invention.

[0192] Recombinant and Synthetic Production of Polypeptides of the Invention

[0193] The present invention also relates to vectors containing the polynucleotide of the present invention, host cells, and the production of polypeptides by synthetic and recombinant techniques. The vector may be, for example, a phage, plasmid, viral, or retroviral vector. Retroviral vectors may be replication competent or replication defective. In the latter case, viral propagation generally will occur only in complementing host cells.

[0194] The polynucleotides of the invention may be joined to a vector containing a selectable marker for propagation in a host. Generally, a plasmid vector is introduced in a precipitate, such as a calcium phosphate precipitate, or in a complex with a charged lipid. If the vector is a virus, it may be packaged in vitro using an appropriate packaging cell line and then transduced into host cells.

[0195] The polynucleotide insert should be operatively linked to an appropriate promoter, such as the phage lambda PL promoter, the E. coli lac, trp, phoA and tac promoters, the SV40 early and late promoters and promoters of retroviral LTRs, to name a few. Other suitable promoters will be known to the skilled artisan. The expression constructs will further contain sites for transcription initiation, termination, and, in the transcribed region, a ribosome binding site for translation. The coding portion of the transcripts expressed by the constructs will preferably include a translation initiating codon at the beginning and a termination codon (UAA, UGA or UAG) appropriately positioned at the end of the polypeptide to be translated.

[0196] As indicated, the expression vectors will preferably include at least one selectable marker. Such markers include dihydrofolate reductase, G418 or neomycin resistance, glutamine synthase, for eukaryotic cell culture and tetracycline, kanamycin or ampicillin resistance genes for culturing in E. coli and other bacteria. Representative examples of appropriate hosts include, but are not limited to, bacterial cells, such as E. coli, Streptomyces and Salmonella typhimurium cells; fungal cells, such as yeast cells (e.g., Saccharomyces cerevisiae or Pichia pastoris (ATCC Accession No. 201178)); insect cells such as Drosophila S2 and Spodoptera Sf9 cells; animal cells such as CHO, COS, 293, NSO and Bowes melanoma cells; and plant cells. Appropriate culture mediums and conditions for the above-described host cells are known in the art.

[0197] Among vectors preferred for use in bacteria include pQE70, pQE60 and pQE-9, available from QIAGEN, Inc.; pBluescript vectors, Phagescript vectors, pNH8A, pNH16a, pNH18A, pNH46A, available from Stratagene Cloning Systems, Inc.; and ptrc99a, pKK223-3, pKK233-3, pDR540, pRIT5 available from Pharmacia Biotech, Inc. Among preferred eukaryotic vectors are pWLNEO, pSV2CAT, pOG44, pXT1 and pSG available from Stratagene; and pSVK3, pBPV, pMSG and pSVL available from Pharmacia. Preferred expression vectors for use in yeast systems include, but are not limited to pYES2, pYD1, pTEF1/Zeo, pYES2/GS, pPICZ, pGAPZ, pGAPZalph, pPIC9, pPIC3.5, pHIL-D2, pHIL-S1, pPIC3.5K, pPIC9K, and PAO815 (all available from Invitrogen, Carlsbad, Calif.). Other suitable vectors will be readily apparent to the skilled artisan.

[0198] Vectors which use glutamine synthase (GS) or DHFR as the selectable markers can be amplified in the presence of the drugs methionine sulphoximine or methotrexate, respectively. An advantage of glutamine synthase based vectors is the availabilty of cell lines (e.g., the murine myeloma cell line, NS0) which are glutamine synthase negative. Glutamine synthase expression systems can also function in glutamine synthase expressing cells (e.g., Chinese Hamster Ovary (CHO) cells) by providing additional inhibitor to prevent the functioning of the endogenous gene. A glutamine synthase expression system and components thereof are detailed in PCT publications: WO87/04462; WO86/05807; WO89/01036; WO89/10404; and WO91/06657 which are hereby incorporated in their entireties by reference herein. Additionally, glutamine synthase expression vectors can be obtained from Lonza Biologics, Inc. (Portsmouth, N.H.). Expression and production of monoclonal antibodies using a GS expression system in murine myeloma cells is described in Bebbington et al., Bio/technology 10:169(1992) and in Biblia and Robinson Biotechnol. Prog. 11:1 (1995) which are herein incorporated by reference.

[0199] The present invention also relates to host cells containing the above-described vector constructs described herein, and additionally encompasses host cells containing nucleotide sequences of the invention that are operably associated with one or more heterologous control regions (e.g., promoter and/or enhancer) using techniques known of in the art. The host cell can be a higher eukaryotic cell, such as a mammalian cell (e.g., a human derived cell), or a lower eukaryotic cell, such as a yeast cell, or the host cell can be a prokaryotic cell, such as a bacterial cell. A host strain may be chosen which modulates the expression of the inserted gene sequences, or modifies and processes the gene product in the specific fashion desired. Expression from certain promoters can be elevated in the presence of certain inducers; thus expression of the genetically engineered polypeptide may be controlled. Furthermore, different host cells have characteristics and specific mechanisms for the translational and post-translational processing and modification (e.g., phosphorylation, cleavage) of proteins. Appropriate cell lines can be chosen to ensure the desired modifications and processing of the foreign protein expressed.

[0200] Introduction of the nucleic acids and nucleic acid constructs of the invention into the host cell can be effected by calcium phosphate transfection, DEAE-dextran mediated transfection, cationic lipid-mediated transfection, electroporation, transduction, infection, or other methods. Such methods are described in many standard laboratory manuals, such as Davis et al., Basic Methods In Molecular Biology (1986). It is specifically contemplated that the polypeptides of the present invention may in fact be expressed by a host cell lacking a recombinant vector.

[0201] In addition to encompassing host cells containing the vector constructs discussed herein, the invention also encompasses primary, secondary, and immortalized host cells of vertebrate origin, particularly mammalian origin, that have been engineered to delete or replace endogenous genetic material (e.g., respiratory system antigen coding sequence), and/or to include genetic material (e.g., heterologous polynucleotide sequences) that is operably associated with respiratory system associated polynucleotides of the invention, and which activates, alters, and/or amplifies endogenous respiratory system associated polynucleotides. For example, techniques known in the art may be used to operably associate heterologous control regions (e.g., promoter and/or enhancer) and endogenous respiratory system associated polynucleotide sequences via homologous recombination (see, e.g., U.S. Pat. No. 5,641,670, issued Jun. 24, 1997; International Publication Number WO 96/29411; International Publication Number WO 94/12650; Koller et al., Proc. Natl. Acad. Sci. USA 86:8932-8935 (1989); and Zijlstra et al., Nature 342:435-438 (1989), the disclosures of each of which are incorporated by reference in their entireties).

[0202] Polypeptides of the present invention can also be recovered from: products purified from natural sources, including bodily fluids, tissues and cells, whether directly isolated or cultured; products of chemical synthetic procedures; and products produced by recombinant techniques from a prokaryotic or eukaryotic host, including, for example, bacterial, yeast, higher plant, insect, and mammalian cells. Depending upon the host employed in a recombinant production procedure, the polypeptides of the present invention may be glycosylated or may be non-glycosylated. In addition, polypeptides of the invention may also include an initial modified methionine residue, in some cases as a result of host-mediated processes. Thus, it is well known in the art that the N-terminal methionine encoded by the translation initiation codon generally is removed with high efficiency from any protein after translation in all eukaryotic cells. While the N-terminal methionine on most proteins also is efficiently removed in most prokaryotes, for some proteins, this prokaryotic removal process is inefficient, depending on the nature of the amino acid to which the N-terminal methionine is covalently linked.

[0203] In one embodiment, the yeast Pichia pastoris is used to express polypeptides of the invention in a eukaryotic system. Pichia pastoris is a methylotrophic yeast which can metabolize methanol as its sole carbon source. A main step in the methanol metabolization pathway is the oxidation of methanol to formaldehyde using O₂. This reaction is catalyzed by the enzyme alcohol oxidase. In order to metabolize methanol as its sole carbon source, Pichia pastoris must generate high levels of alcohol oxidase due, in part, to the relatively low affinity of alcohol oxidase for O₂. Consequently, in a growth medium depending on methanol as a main carbon source, the promoter region of one of the two alcohol oxidase genes (AOX1) is highly active. In the presence of methanol, alcohol oxidase produced from the AOX1 gene comprises up to approximately 30% of the total soluble protein in Pichia pastoris. See, Ellis, S. B., et al, Mol. Cell. Biol. 5:1111-21 (1985); Koutz, P. J, et al., Yeast 5:167-77 (1989); Tschopp, J. F., et al., Nucl. Acids Res. 15:3859-76 (1987). Thus, a heterologous coding sequence, such as, for example, a polynucleotide of the present invention, under the transcriptional regulation of all or part of the AOX1 regulatory sequence is expressed at exceptionally high levels in Pichia yeast grown in the presence of methanol.

[0204] In one example, the plasmid vector pPIC9K is used to express DNA encoding a polypeptide of the invention, as set forth herein, in a Pichea yeast system essentially as described in “Pichia Protocols: Methods in Molecular Biology,” D. R. Higgins and J. Cregg, eds. The Humana Press, Totowa, N.J., 1998. This expression vector allows expression and secretion of a polypeptide of the invention by virtue of the strong AOX1 promoter linked to the Pichia pastoris alkaline phosphatase (PHO) secretory signal peptide (i.e., leader) located upstream of a multiple cloning site.

[0205] Many other yeast vectors could be used in place of pPIC9K, such as, pYES2, pYD1, pTEF1/Zeo, pYES2/GS, pPICZ, pGAPZ, pGAPZalpha, pPIC9, pPIC3.5, pHIL-D2, pHIL S1, pPIC3.5K, and PAO815, as one skilled in the art would readily appreciate, as long as the proposed expression construct provides appropriately located signals for transcription, translation, secretion (if desired), and the like, including an in-frame AUG as required.

[0206] In another embodiment, high-level expression of a heterologous coding sequence, such as, for example, a polynucleotide of the present invention, may be achieved by cloning the heterologous polynucleotide of the invention into an expression vector such as, for example, pGAPZ or pGAPZalpha, and growing the yeast culture in the absence of methanol.

[0207] In addition to encompassing host cells containing the vector constructs discussed herein, the invention also encompasses primary, secondary, and immortalized host cells of vertebrate origin, particularly mammalian origin, that have been engineered to delete or replace endogenous genetic material (e.g., coding sequence), and/or to include genetic material (e.g., heterologous polynucleotide sequences) that is operably associated with polynucleotides of the invention, and which activates, alters, and/or amplifies endogenous polynucleotides. For example, techniques known in the art may be used to operably associate heterologous control regions (e.g., promoter and/or enhancer) and endogenous polynucleotide sequences via homologous recombination (see, e.g., U.S. Pat. No. 5,641,670, issued Jun. 24, 1997; International Publication No. WO 96/29411, published Sep. 26, 1996; International Publication No. WO 94/12650, published Aug. 4, 1994; Koller et al., Proc. Natl. Acad. Sci. USA 86:8932-8935 (1989); and Zijlstra et al., Nature 342:435-438 (1989), the disclosures of each of which are incorporated by reference in their entireties).

[0208] In addition, polypeptides of the invention can be chemically synthesized using techniques known in the art (e.g., see Creighton, 1983, Proteins: Structures and Molecular Principles, W. H. Freeman & Co., N.Y., and Hunkapiller et al., Nature, 310:105-111 (1984)). For example, a polypeptide corresponding to a fragment of a polypeptide can be synthesized by use of a peptide synthesizer. Furthermore, if desired, nonclassical amino acids or chemical amino acid analogs can be introduced as a substitution or addition into the polypeptide sequence. Non-classical amino acids include, but are not limited to, to the D-isomers of the common amino acids, 2,4-diaminobutyric acid, a-amino isobutyric acid, 4-aminobutyric acid, Abu, 2-amino butyric acid, g-Abu, e-Ahx, 6-amino hexanoic acid, Aib, 2-amino isobutyric acid, 3-amino propionic acid, ornithine, norleucine, norvaline, hydroxyproline, sarcosine, citrulline, homocitrulline, cysteic acid, t-butylglycine, t-butylalanine, phenylglycine, cyclohexylalanine, b-alanine, fluoro-amino acids, designer amino acids such as b-methyl amino acids, Ca-methyl amino acids, Na-methyl amino acids, and amino acid analogs in general. Furthermore, the amino acid can be D (dextrorotary) or L (levorotary).

[0209] The invention encompasses polypeptides of the present invention which are differentially modified during or after translation, e.g., by glycosylation, acetylation, phosphorylation, amidation, derivatization by known protecting/blocking groups, proteolytic cleavage, linkage to an antibody molecule or other cellular ligand, etc. Any of numerous chemical modifications may be carried out by known techniques, including but not limited, to specific chemical cleavage by cyanogen bromide, trypsin, chymotrypsin, papain, V8 protease, NaBH₄; acetylation, formylation, oxidation, reduction; metabolic synthesis in the presence of tunicamycin; etc.

[0210] Additional post-translational modifications encompassed by the invention include, for example, e.g., N-linked or O-linked carbohydrate chains, processing of N-terminal or C-terminal ends), attachment of chemical moieties to the amino acid backbone, chemical modifications of N-linked or O-linked carbohydrate chains, and addition or deletion of an N-terminal methionine residue as a result of procaryotic host cell expression. The polypeptides may also be modified with a detectable label, such as an enzymatic, fluorescent, isotopic or affinity label to allow for detection and isolation of the protein.

[0211] Examples of suitable enzymes include horseradish peroxidase, alkaline phosphatase, beta-galactosidase, or acetylcholinesterase; examples of suitable prosthetic group complexes include streptavidin/biotin and avidin/biotin; examples of suitable fluorescent materials include umbelliferone, fluorescein, fluorescein isothiocyanate, rhodamine, dichlorotriazinylamine fluorescein, dansyl chloride or phycoerythrin; an example of a luminescent material includes luminol; examples of bioluminescent materials include luciferase, luciferin, and aequorin; and examples of suitable radioactive material include iodine (¹²¹I, ¹²³I, ¹²⁵I, ¹³¹I), carbon (¹⁴C), sulfur (³⁵S), tritium (³H), indium (¹¹¹In, ¹¹²In, ^{113m}In, ^{115m}In), technetium (⁹⁹Tc, ^{99m}Tc), thallium (²⁰¹Ti), gallium (⁶⁸Ga, ⁶⁷Ga), palladium (¹⁰³Pd), molybdenum (⁹⁹Mo), xenon (¹³³Xe), fluorine (¹⁸F), ¹⁵³Sm, ¹⁷⁷Lu, ¹⁵⁹Gd, ¹⁴⁹Pm, ¹⁴⁰La, ¹⁷⁵Yb, ¹⁶⁶Ho, ⁹⁰Y, ⁴⁷Sc, ¹⁸⁶Re, ¹⁸⁸Re, ¹⁴²Pr, ¹⁰⁵Rh, and ⁹⁷Ru.

[0212] In specific embodiments, a polypeptide of the present invention or fragment or variant thereof is attached to macrocyclic chelators that associate with radiometal ions, including but not limited to, ¹⁷⁷Lu, ⁹⁰Y, ¹⁶⁶Ho, and ¹⁵³Sm, to polypeptides. In a preferred embodiment, the radiometal ion associated with the macrocyclic chelators is ¹¹¹In. In another preferred embodiment, the radiometal ion associated with the macrocyclic chelator is ⁹⁰Y. In specific embodiments, the macrocyclic chelator is 1,4,7,10-tetraazacyclododecane-N,N′,N″,N′″-tetraacetic acid (DOTA). In other specific embodiments, DOTA is attached to an antibody of the invention or fragment thereof via a linker molecule. Examples of linker molecules useful for conjugating DOTA to a polypeptide are commonly known in the art—see, for example, DeNardo et al., Clin Cancer Res. 4(10):2483-90 (1998); Peterson et al., Bioconjug. Chem. 10(4):553-7 (1999); and Zimmerman et al, Nucl. Med. Biol. 26(8):943-50 (1999); which are hereby incorporated by reference in their entirety.

[0213] As mentioned, the respiratory system associated proteins of the invention may be modified by either natural processes, such as posttranslational processing, or by chemical modification techniques which are well known in the art. It will be appreciated that the same type of modification may be present in the same or varying degrees at several sites in a given respiratory system associated polypeptide. Respiratory system associated polypeptides may be branched, for example, as a result of ubiquitination, and they may be cyclic, with or without branching. Cyclic, branched, and branched cyclic respiratory system associated polypeptides may result from posttranslation natural processes or may be made by synthetic methods. Modifications include acetylation, acylation, ADP-ribosylation, amidation, covalent attachment of flavin, covalent attachment of a heme moiety, covalent attachment of a nucleotide or nucleotide derivative, covalent attachment of a lipid or lipid derivative, covalent attachment of phosphotidylinositol, cross-linking, cyclization, disulfide bond formation, demethylation, formation of covalent cross-links, formation of cysteine, formation of pyroglutamate, formylation, gamma-carboxylation, glycosylation, GPI anchor formation, hydroxylation, iodination, methylation, myristoylation, oxidation, pegylation, proteolytic processing, phosphorylation, prenylation, racemization, selenoylation, sulfation, transfer-RNA mediated addition of amino acids to proteins such as arginylation, and ubiquitination. (See, for instance, PROTEINS—STRUCTURE AND MOLECULAR PROPERTIES, 2nd Ed., T. E. Creighton, W. H. Freeman and Company, New York (1993); POSTTRANSLATIONAL COVALENT MODIFICATION OF PROTEINS, B. C. Johnson, Ed., Academic Press, New York, pgs. 1-12 (1983); Seifter et al., Meth. Enzymol. 182:626-646 (1990); Rattan et al., Ann. N.Y. Acad. Sci. 663:48-62 (1992)).

[0214] Also provided by the invention are chemically modified derivatives of the polypeptides of the invention which may provide additional advantages such as increased solubility, stability and circulating time of the polypeptide, or decreased immunogenicity (see U.S. Pat. No. 4,179,337). The chemical moieties for derivitization may be selected from water soluble polymers such as polyethylene glycol, ethylene glycol/propylene glycol copolymers, carboxymethylcellulose, dextran, polyvinyl alcohol and the like. The polypeptides may be modified at random positions within the molecule, or at predetermined positions within the molecule and may include one, two, three or more attached chemical moieties.

[0215] The polymer may be of any molecular weight, and may be branched or unbranched. For polyethylene glycol, the preferred molecular weight is between about 1 kDa and about 100 kDa (the term “about” indicating that in preparations of polyethylene glycol, some molecules will weigh more, some less, than the stated molecular weight) for ease in handling and manufacturing. Other sizes may be used, depending on the desired therapeutic profile (e.g., the duration of sustained release desired, the effects, if any on biological activity, the ease in handling, the degree or lack of antigenicity and other known effects of the polyethylene glycol to a therapeutic protein or analog). For example, the polyethylene glycol may have an average molecular weight of about 200, 500, 1000, 1500, 2000, 2500, 3000, 3500, 4000, 4500, 5000, 5500, 6000, 6500, 7000, 7500, 8000, 8500, 9000, 9500, 10,000, 10,500, 11,000, 11,500, 12,000, 12,500, 13,000, 13,500, 14,000, 14,500, 15,000, 15,500, 16,000, 16,500, 17,000, 17,500, 18,000, 18,500, 19,000, 19,500, 20,000, 25,000, 30,000, 35,000, 40,000, 50,000, 55,000, 60,000, 65,000, 70,000, 75,000, 80,000, 85,000, 90,000, 95,000, or 100,000 kDa.

[0216] As noted above, the polyethylene glycol may have a branched structure. Branched polyethylene glycols are described, for example, in U.S. Pat. No. 5,643,575; Morpurgo et al., Appl. Biochem. Biotechnol. 56:59-72 (1996); Vorobjev et al., Nucleosides Nucleotides 18:2745-2750 (1999); and Caliceti et al., Bioconjug. Chem. 10:638-646 (1999), the disclosures of each of which are incorporated herein by reference.

[0217] The polyethylene glycol molecules (or other chemical moieties) should be attached to the protein with consideration of effects on functional or antigenic domains of the protein. There are a number of attachment methods available to those skilled in the art, such as, for example, the method disclosed in EP 0 401 384 (coupling PEG to G-CSF), herein incorporated by reference; see also Malik et al., Exp. Hematol. 20:1028-1035 (1992), reporting pegylation of GM-CSF using tresyl chloride. For example, polyethylene glycol may be covalently bound through amino acid residues via a reactive group, such as a free amino or carboxyl group. Reactive groups are those to which an activated polyethylene glycol molecule may be bound. The amino acid residues having a free amino group may include lysine residues and the N-terminal amino acid residues; those having a free carboxyl group may include aspartic acid residues glutamic acid residues and the C-terminal amino acid residue. Sulfhydryl groups may also be used as a reactive group for attaching the polyethylene glycol molecules. Preferred for therapeutic purposes is attachment at an amino group, such as attachment at the N-terminus or lysine group.

[0218] As suggested above, polyethylene glycol may be attached to proteins via linkage to any of a number of amino acid residues. For example, polyethylene glycol can be linked to proteins via covalent bonds to lysine, histidine, aspartic acid, glutamic acid, or cysteine residues. One or more reaction chemistries may be employed to attach polyethylene glycol to specific amino acid residues (e.g., lysine, histidine, aspartic acid, glutamic acid, or cysteine) of the protein or to more than one type of amino acid residue (e.g., lysine, histidine, aspartic acid, glutamic acid, cysteine and combinations thereof) of the protein.

[0219] One may specifically desire proteins chemically modified at the N-terminus. Using polyethylene glycol as an illustration of the present composition, one may select from a variety of polyethylene glycol molecules (by molecular weight, branching, etc.), the proportion of polyethylene glycol molecules to protein (polypeptide) molecules in the reaction mix, the type of pegylation reaction to be performed, and the method of obtaining the selected N-terminally pegylated protein. The method of obtaining the N-terminally pegylated preparation (i.e., separating this moiety from other monopegylated moieties if necessary) may be by purification of the N-terminally pegylated material from a population of pegylated protein molecules. Selective proteins chemically modified at the N-terminus modification may be accomplished by reductive alkylation which exploits differential reactivity of different types of primary amino groups (lysine versus the N-terminal) available for derivatization in a particular protein. Under the appropriate reaction conditions, substantially selective derivatization of the protein at the N-terminus with a carbonyl group containing polymer is achieved.

[0220] As indicated above, pegylation of the proteins of the invention may be accomplished by any number of means. For example, polyethylene glycol may be attached to the protein either directly or by an intervening linker. Linkerless systems for attaching polyethylene glycol to proteins are described in Delgado et al., Crit. Rev. Thera. Drug Carrier Sys. 9:249-304 (1992); Francis et al., Intern. J. of Hematol. 68:1-18 (1998); U.S. Pat. Nos. 4,002,531; 5,349,052; WO 95/06058; and WO 98/32466, the disclosures of each of which are incorporated herein by reference.

[0221] One system for attaching polyethylene glycol directly to amino acid residues of proteins without an intervening linker employs tresylated MPEG, which is produced by the modification of monmethoxy polyethylene glycol (MPEG) using tresylchloride (ClSO₂CH₂CF₃). Upon reaction of protein with tresylated MPEG, polyethylene glycol is directly attached to amine groups of the protein. Thus, the invention includes proteinpolyethylene glycol conjugates produced by reacting proteins of the invention with a polyethylene glycol molecule having a 2,2,2-trifluoreothane sulphonyl group.

[0222] Polyethylene glycol can also be attached to proteins using a number of different intervening linkers. For example, U.S. Pat. No. 5,612,460, the entire disclosure of which is incorporated herein by reference, discloses urethane linkers for connecting polyethylene glycol to proteins. Protein-polyethylene glycol conjugates wherein the polyethylene glycol is attached to the protein by a linker can also be produced by reaction of proteins with compounds such as MPEG-succinimidylsuccinate, MPEG activated with 1,1′-carbonyldiimidazole, MPEG-2,4,5-trichloropenylcarbonate, MPEG-p-nitrophenolcarbonate, and various MPEG-succinate derivatives. A number of additional polyethylene glycol derivatives and reaction chemistries for attaching polyethylene glycol to proteins are described in International Publication No. WO 98/32466, the entire disclosure of which is incorporated herein by reference. Pegylated protein products produced using the reaction chemistries set out herein are included within the scope of the invention.

[0223] The number of polyethylene glycol moieties attached to each protein of the invention (i.e., the degree of substitution) may also vary. For example, the pegylated proteins of the invention may be linked, on average, to 1, 2, 3, 4, 5, 6, 7, 8, 9, 10, 12, 15, 17, 20, or more polyethylene glycol molecules. Similarly, the average degree of substitution within ranges such as 1-3, 2-4, 3-5, 4-6, 5-7, 6-8, 7-9, 8-10, 9-11, 10-12, 11-13, 12-14, 13-15, 14-16, 15-17, 16-18, 17-19, or 18-20 polyethylene glycol moieties per protein molecule. Methods for determining the degree of substitution are discussed, for example, in Delgado et al., Crit. Rev. Thera. Drug Carrier Sys. 9:249-304 (1992).

[0224] The respiratory system associated polypeptides of the invention can be recovered and purified from chemical synthesis and recombinant cell cultures by standard methods which include, but are not limited to, ammonium sulfate or ethanol precipitation, acid extraction, anion or cation exchange chromatography, phosphocellulose chromatography, hydrophobic interaction chromatography, affinity chromatography, hydroxylapatite chromatography and lectin chromatography. Most preferably, high performance liquid chromatography (“HPLC”) is employed for purification. Well known techniques for refolding protein may be employed to regenerate active conformation when the polypeptide is denatured during isolation and/or purification.

[0225] Respiratory system associated polynucleotides and polypeptides may be used in accordance with the present invention for a variety of applications, particularly those that make use of the chemical and biological properties of respiratory system associated antigens. Among these are applications in the detection, prevention, diagnosis and/or treatment of diseases associated with respiratory system, such as e.g., cancer of respiratory system tissues, tumors, throat disorders (e.g., vocal cord paralysis, tonsillitis, and larynigitis), lung disorders (e.g., pneumonia, allegeric disorders (e.g., asthma and eosionphilic pheumonia), pleurisy, cystic fibrosis, emphysema, histiocytosis X, and sarcoidosis), nose disorders (rhinitis and sinusitis), neoplasms and/or cancers of respiratory tissues (e.g., throat cancer, lung cancer, and cancer of the nose), and/or those disorders as described under “Respiratory Disorders”. Additional applications relate to diagnosis and to treatment of disorders of cells, tissues and organisms. These aspects of the invention are discussed further below.

[0226] In a preferred embodiment, polynucleotides expressed in a particular tissue type are used to detect, diagnose, treat, prevent and/or prognose disorders associated with the tissue type.

[0227] The polypeptides of the invention may be in monomers or multimers (i.e., dimers, trimers, tetramers and higher multimers). Accordingly, the present invention relates to monomers and multimers of the polypeptides of the invention, their preparation, and compositions (preferably, Therapeutics) containing them. In specific embodiments, the polypeptides of the invention are monomers, dimers, trimers or tetramers. In additional embodiments, the multimers of the invention are at least dimers, at least trimers, or at least tetramers.

[0228] Multimers encompassed by the invention may be homomers or heteromers. As used herein, the term homomer refers to a multimer containing only polypeptides corresponding to a protein of the invention (e.g., the amino acid sequence of SEQ ID NO:Y, an amino acid sequence encoded by SEQ ID NO:X or the complement of SEQ ID NO:X, the amino acid sequence encoded by the portion of SEQ ID NO:X as defined in columns 8 and 9 of Table 2, and/or an amino acid sequence encoded by cDNA contained in Clone ID NO:Z (including fragments, variants, splice variants, and fusion proteins, corresponding to these as described herein)). These homomers may contain polypeptides having identical or different amino acid sequences. In a specific embodiment, a homomer of the invention is a multimer containing only polypeptides having an identical amino acid sequence. In another specific embodiment, a homomer of the invention is a multimer containing polypeptides having different amino acid sequences. In specific embodiments, the multimer of the invention is a homodimer (e.g., containing two polypeptides having identical or different amino acid sequences) or a homotrimer (e.g., containing three polypeptides having identical and/or different amino acid sequences). In additional embodiments, the homomeric multimer of the invention is at least a homodimer, at least a homotrimer, or at least a homotetramer.

[0229] As used herein, the term heteromer refers to a multimer containing two or more heterologous polypeptides (i.e., polypeptides of different proteins) in addition to the polypeptides of the invention. In a specific embodiment, the multimer of the invention is a heterodimer, a heterotrimer, or a heterotetramer. In additional embodiments, the heteromeric multimer of the invention is at least a heterodimer, at least a heterotrimer, or at least a heterotetramer.

[0230] Multimers of the invention may be the result of hydrophobic, hydrophilic, ionic and/or covalent associations and/or may be indirectly linked by, for example, liposome formation. Thus, in one embodiment, multimers of the invention, such as, for example, homodimers or homotrimers, are formed when polypeptides of the invention contact one another in solution. In another embodiment, heteromultimers of the invention, such as, for example, heterotrimers or heterotetramers, are formed when polypeptides of the invention contact antibodies to the polypeptides of the invention (including antibodies to the heterologous polypeptide sequence in a fusion protein of the invention) in solution. In other embodiments, multimers of the invention are formed by covalent associations with and/or between the polypeptides of the invention. Such covalent associations may involve one or more amino acid residues contained in the polypeptide sequence (e.g., that recited in SEQ ID NO:Y, encoded by the portion of SEQ ID NO:X as defined in columns 8 and 9 of Table 2, and/or encoded by the cDNA contained in Clone ID NO:Z). In one instance, the covalent associations are cross-linking between cysteine residues located within the polypeptide sequences which interact in the native (i.e., naturally occurring) polypeptide. In another instance, the covalent associations are the consequence of chemical or recombinant manipulation. Alternatively, such covalent associations may involve one or more amino acid residues contained in the heterologous polypeptide sequence in a fusion protein. In one example, covalent associations are between the heterologous sequence contained in a fusion protein of the invention (see, e.g., U.S. Pat. No. 5,478,925). In a specific example, the covalent associations are between the heterologous sequence contained in a Fc fusion protein of the invention (as described herein). In another specific example, covalent associations of fusion proteins of the invention are between heterologous polypeptide sequence from another protein that is capable of forming covalently associated multimers, such as for example, osteoprotegerin (see, e.g., International Publication NO: WO 98/49305, the contents of which are herein incorporated by reference in its entirety). In another embodiment, two or more polypeptides of the invention are joined through peptide linkers. Examples include those peptide linkers described in U.S. Pat. No. 5,073,627 (hereby incorporated by reference). Proteins comprising multiple polypeptides of the invention separated by peptide linkers may be produced using conventional recombinant DNA technology.

[0231] Another method for preparing multimer polypeptides of the invention involves use of polypeptides of the invention fused to a leucine zipper or isoleucine zipper polypeptide sequence. Leucine zipper and isoleucine zipper domains are polypeptides that promote multimerization of the proteins in which they are found. Leucine zippers were originally identified in several DNA-binding proteins (Landschulz et al., Science 240:1759, (1988)), and have since been found in a variety of different proteins. Among the known leucine zippers are naturally occurring peptides and derivatives thereof that dimerize or trimerize. Examples of leucine zipper domains suitable for producing soluble multimeric proteins of the invention are those described in PCT application WO 94/10308, hereby incorporated by reference. Recombinant fusion proteins comprising a polypeptide of the invention fused to a polypeptide sequence that dimerizes or trimerizes in solution are expressed in suitable host cells, and the resulting soluble multimeric fusion protein is recovered from the culture supernatant using techniques known in the art.

[0232] Trimeric polypeptides of the invention may offer the advantage of enhanced biological activity. Preferred leucine zipper moieties and isoleucine moieties are those that preferentially form trimers. One example is a leucine zipper derived from lung surfactant protein D (SPD), as described in Hoppe et al. (FEBS Letters 344:191, (1994)) and in U.S. patent application Ser. No. 08/446,922, hereby incorporated by reference. Other peptides derived from naturally occurring trimeric proteins may be employed in preparing trimeric polypeptides of the invention.

[0233] In another example, proteins of the invention are associated by interactions between Flag® polypeptide sequence contained in fusion proteins of the invention containing Flag® polypeptide sequence. In a further embodiment, proteins of the invention are associated by interactions between heterologous polypeptide sequence contained in Flag® fusion proteins of the invention and anti-Flag® antibody.

[0234] The multimers of the invention may be generated using chemical techniques known in the art. For example, polypeptides desired to be contained in the multimers of the invention may be chemically cross-linked using linker molecules and linker molecule length optimization techniques known in the art (see, e.g., U.S. Pat. No. 5,478,925, which is herein incorporated by reference in its entirety). Additionally, multimers of the invention may be generated using techniques known in the art to form one or more intermolecule cross-links between the cysteine residues located within the sequence of the polypeptides desired to be contained in the multimer (see, e.g., U.S. Pat. No. 5,478,925, which is herein incorporated by reference in its entirety). Further, polypeptides of the invention may be routinely modified by the addition of cysteine or biotin to the C-terminus or N-terminus of the polypeptide and techniques known in the art may be applied to generate multimers containing one or more of these modified polypeptides (see, e.g., U.S. Pat. No. 5,478,925, which is herein incorporated by reference in its entirety). Additionally, techniques known in the art may be applied to generate liposomes containing the polypeptide components desired to be contained in the multimer of the invention (see, e.g., U.S. Pat. No. 5,478,925, which is herein incorporated by reference in its entirety).

[0235] Alternatively, multimers of the invention may be generated using genetic engineering techniques known in the art. In one embodiment, polypeptides contained in multimers of the invention are produced recombinantly using fusion protein technology described herein or otherwise known in the art (see, e.g., U.S. Pat. No. 5,478,925, which is herein incorporated by reference in its entirety). In a specific embodiment, polynucleotides coding for a homodimer of the invention are generated by ligating a polynucleotide sequence encoding a polypeptide of the invention to a sequence encoding a linker polypeptide and then further to a synthetic polynucleotide encoding the translated product of the polypeptide in the reverse orientation from the original C-terminus to the N-terminus (lacking the leader sequence) (see, e.g., U..S Pat. No. 5,478,925, which is herein incorporated by reference in its entirety). In another embodiment, recombinant techniques described herein or otherwise known in the art are applied to generate recombinant polypeptides of the invention which contain a transmembrane domain (or hydrophobic or signal peptide) and which can be incorporated by membrane reconstitution techniques into liposomes (see, e.g., U.S. Pat. No. 5,478,925, which is herein incorporated by reference in its entirety).

[0236] Antibodies

[0237] Further polypeptides of the invention relate to antibodies and T-cell antigen receptors (TCR) which immunospecifically bind a polypeptide, polypeptide fragment, or variant of the invention (e.g., a polypeptide or fragment or variant of the amino acid sequence of SEQ ID NO:Y or a polypeptide encoded by the cDNA contained in Clone ID NO:Z, and/or an epitope, of the present invention) as determined by immunoassays well known in the art for assaying specific antibody-antigen binding. Antibodies of the invention include, but are not limited to, polyclonal, monoclonal, multispecific, human, humanized or chimeric antibodies, single chain antibodies, Fab fragments, F(ab′) fragments, fragments produced by a Fab expression library, anti-idiotypic (anti-Id) antibodies (including, e.g., anti-Id antibodies to antibodies of the invention), intracellularly-made antibodies (i.e., intrabodies), and epitope-binding fragments of any of the above. The term “antibody,” as used herein, refers to immunoglobulin molecules and immunologically active portions of immunoglobulin molecules, i.e., molecules that contain an antigen binding site that immunospecifically binds an antigen. The immunoglobulin molecules of the invention can be of any type (e.g., IgG, IgE, IgM, IgD, IgA and IgY), class (e.g., IgG1, IgG2, IgG3, IgG4, IgA1 and IgA2) or subclass of immunoglobulin molecule. In preferred embodiments, the immunoglobulin molecules of the invention are IgG1. In other preferred embodiments, the immunoglobulin molecules of the invention are IgG4.

[0238] Most preferably the antibodies are human antigen-binding antibody fragments of the present invention and include, but are not limited to, Fab, Fab′ and F(ab′)2, Fd, single-chain Fvs (scFv), single-chain antibodies, disulfide-linked Fvs (sdFv) and fragments comprising either a VL or VH domain. Antigen-binding antibody fragments, including single-chain antibodies, may comprise the variable region(s) alone or in combination with the entirety or a portion of the following: hinge region, CH1, CH2, and CH3 domains. Also included in the invention are antigen-binding fragments also comprising any combination of variable region(s) with a hinge region, CH1, CH2, and CH3 domains. The antibodies of the invention may be from any animal origin including birds and mammals. Preferably, the antibodies are human, murine (e.g., mouse and rat), donkey, ship rabbit, goat, guinea pig, camel, horse, or chicken. As used herein, “human” antibodies include antibodies having the amino acid sequence of a human immunoglobulin and include antibodies isolated from human immunoglobulin libraries or from animals transgenic for one or more human immunoglobulin and that do not express endogenous immunoglobulins, as described infra and, for example in, U.S. Pat. No. 5,939,598 by Kucherlapati et al.

[0239] The antibodies of the present invention may be monospecific, bispecific, trispecific or of greater multispecificity. Multispecific antibodies may be specific for different epitopes of a polypeptide of the present invention or may be specific for both a polypeptide of the present invention as well as for a heterologous epitope, such as a heterologous polypeptide or solid support material. See, e.g., PCT publications WO 93/17715; WO 92/08802; WO 91/00360; WO 92/05793; Tutt, et al., J. Immunol. 147:60-69 (1991); U.S. Pat. Nos. 4,474,893; 4,714,681; 4,925,648; 5,573,920; 5,601,819; Kostelny et al., J. Immunol. 148:1547-1553 (1992).

[0240] Antibodies of the present invention may be described or specified in terms of the epitope(s) or portion(s) of a polypeptide of the present invention, which they recognize or specifically bind. The epitope(s) or polypeptide portion(s) may be specified as described herein, e.g., by N-terminal and C-terminal positions, or by size in contiguous amino acid residues, or listed in the Tables and Figures. Preferred epitopes of the invention include those shown in column 6 of Table 1A, as well as polynucleotides that encode these epitopes. Antibodies, which specifically bind any epitope or polypeptide of the present invention may also be excluded. Therefore, the present invention includes antibodies that specifically bind polypeptides of the present invention, and allows for the exclusion of the same.

[0241] Antibodies of the present invention may also be described or specified in terms of their cross-reactivity. Antibodies that do not bind any other analog, ortholog, or homolog of a polypeptide of the present invention are included. Antibodies that bind polypeptides with at least 95%, at least 90%, at least 85%, at least 80%, at least 75%, at least 70%, at least 65%, at least 60%, at least 55%, and at least 50% identity (as calculated using methods known in the art and described herein) to a polypeptide of the present invention are also included in the present invention. In specific embodiments, antibodies of the present invention cross-react with murine, rat and/or rabbit homologs of human proteins and the corresponding epitopes thereof. Antibodies that do not bind polypeptides with less than 95%, less than 90%, less than 85%, less than 80%, less than 75%, less than 70%, less than 65%, less than 60%, less than 55%, and less than 50% identity (as calculated using methods known in the art and described herein) to a polypeptide of the present invention are also included in the present invention. In a specific embodiment, the above-described cross-reactivity is with respect to any single specific antigenic or immunogenic polypeptide, or combination(s) of 2, 3, 4, 5, or more of the specific antigenic and/or immunogenic polypeptides disclosed herein. Further included in the present invention are antibodies, which bind polypeptides encoded by polynucleotides, which hybridize to a polynucleotide of the present invention under stringent hybridization conditions (as described herein). Antibodies of the present invention may also be described or specified in terms of their binding affinity to a polypeptide of the invention. Preferred binding affinities include those with a dissociation constant or Kd less than 5×10⁻² M, 10⁻² M, 5×10⁻³ M, 10⁻³ M, 5×10⁻⁴ M, 10⁻⁴ M, 5×10⁻⁵ M, 10⁻⁵ M, 5×10⁻⁶ M, 10⁻⁶M, 5×10⁻⁷ M, 10⁻⁷ M, 5×10⁻⁸ M, 10⁻⁸ M, 5×10⁻⁹ M, 10⁻⁹ M, 5×10⁻¹⁰ M, 10⁻¹⁰ M, 5×10⁻¹¹ M, 10⁻¹¹ M, 5×10⁻¹² M, 10⁻¹² M, 5×10⁻¹³ M, 10⁻¹³ M, 5×10⁻¹⁴ M, 10⁻¹⁴ M, 5×10⁻¹⁵ M, or 10⁻¹⁵ M.

[0242] The invention also provides antibodies that competitively inhibit binding of an antibody to an epitope of the invention as determined by any method known in the art for determining competitive binding, for example, the immunoassays described herein. In preferred embodiments, the antibody competitively inhibits binding to the epitope by at least 95%, at least 90%, at least 85%, at least 80%, at least 75%, at least 70%, at least 60%, or at least 50%.

[0243] Antibodies of the present invention may act as agonists or antagonists of the polypeptides of the present invention. For example, the present invention includes antibodies, which disrupt the receptor/ligand interactions with the polypeptides of the invention either partially or fully. Preferably, antibodies of the present invention bind an antigenic epitope disclosed herein, or a portion thereof. The invention features both receptor-specific antibodies and ligand-specific antibodies. The invention also features receptor-specific antibodies, which do not prevent ligand binding but prevent receptor activation. Receptor activation (i.e., signaling) may be determined by techniques described herein or otherwise known in the art. For example, receptor activation can be determined by detecting the phosphorylation (e.g., tyrosine or serine/threonine) of the receptor or its substrate by immunoprecipitation followed by western blot analysis (for example, as described supra). In specific embodiments, antibodies are provided that inhibit ligand activity or receptor activity by at least 95%, at least 90%, at least 85%, at least 80%, at least 75%, at least 70%, at least 60%, or at least 50% of the activity in absence of the antibody.

[0244] The invention also features receptor-specific antibodies which both prevent ligand binding and receptor activation as well as antibodies that recognize the receptor-ligand complex, and, preferably, do not specifically recognize the unbound receptor or the unbound ligand. Likewise, included in the invention are neutralizing antibodies which bind the ligand and prevent binding of the ligand to the receptor, as well as antibodies which bind the ligand, thereby preventing receptor activation, but do not prevent the ligand from binding the receptor. Further included in the invention are antibodies, which activate the receptor. These antibodies may act as receptor agonists, i.e., potentiate or activate either all or a subset of the biological activities of the ligand-mediated receptor activation, for example, by inducing dimerization of the receptor. The antibodies may be specified as agonists, antagonists or inverse agonists for biological activities comprising the specific biological activities of the peptides of the invention disclosed herein. The above antibody agonists can be made using methods known in the art. See, e.g., PCT publication WO 96/40281; U.S. Pat. No. 5,811,097; Deng et al., Blood 92(6):1981-1988 (1998); Chen et al., Cancer Res. 58(16):3668-3678 (1998); Harrop et al., J. Immunol. 161(4):1786-1794 (1998); Zhu et al., Cancer Res. 58(15):3209-3214 (1998); Yoon et al., J. Immunol. 160(7):3170-3179 (1998); Prat et al., J. Cell. Sci. 111(Pt2):237-247 (1998); Pitard et al., J. Immunol. Methods 205(2):177-190 (1997); Liautard et al., Cytokine 9(4):233-241 (1997); Carlson et al., J. Biol. Chem. 272(17).11295-11301 (1997); Taryman et al., Neuron 14(4):755-762 (1995); Muller et al., Structure 6(9):1153-1167 (1998); Bartunek et al., Cytokine 8(1):14-20 (1996) (which are all incorporated by reference herein in their entireties).

[0245] Antibodies of the present invention may be used, for example, to purify, detect, and target the polypeptides of the present invention, including both in vitro and in vivo diagnostic and therapeutic methods. For example, the antibodies have utility in immunoassays for qualitatively and quantitatively measuring levels of the polypeptides of the present invention in biological samples. See, e.g., Harlow et al., Antibodies: A Laboratory Manual, (Cold Spring Harbor Laboratory Press, 2nd ed. 1988); incorporated by reference herein in its entirety.

[0246] As discussed in more detail below, the antibodies of the present invention may be used either alone or in combination with other compositions. The antibodies may further be recombinantly fused to a heterologous polypeptide at the N- or C-terminus or chemically conjugated (including covalent and non-covalent conjugations) to polypeptides or other compositions. For example, antibodies of the present invention may be recombinantly fused or conjugated to molecules useful as labels in detection assays and effector molecules such as heterologous polypeptides, drugs, radionuclides, or toxins. See, e.g., PCT publications WO 92/08495; WO 91/14438; WO 89/12624; U.S. Pat. No. 5,314,995; and EP 396,387; the disclosures of which are incorporated herein by reference in their entireties.

[0247] The antibodies of the invention include derivatives that are modified, i.e., by the covalent attachment of any type of molecule to the antibody such that covalent attachment does not prevent the antibody from generating an anti-idiotypic response. For example, but not by way of limitation, the antibody derivatives include antibodies that have been modified, e.g., by glycosylation, acetylation, pegylation, phosphylation, amidation, derivatization by known protecting/blocking groups, proteolytic cleavage, linkage to a cellular ligand or other protein, etc. Any of numerous chemical modifications may be carried out by known techniques, including, but not limited to specific chemical cleavage, acetylation, formylation, metabolic synthesis of tunicamycin, etc. Additionally, the derivative may contain one or more non-classical amino acids.

[0248] The antibodies of the present invention may be generated by any suitable method known in the art. Polyclonal antibodies to an antigen-of-interest can be produced by various procedures well known in the art. For example, a polypeptide of the invention can be administered to various host animals including, but not limited to, rabbits, mice, rats, etc. to induce the production of sera containing polyclonal antibodies specific for the antigen. Various adjuvants may be used to increase the immunological response, depending on the host species, and include but are not limited to, Freund's (complete and incomplete), mineral gels such as aluminum hydroxide, surface active substances such as lysolecithin, pluronic polyols, polyanions, peptides, oil emulsions, keyhole limpet hemocyanins, dinitrophenol, and potentially useful human adjuvants such as BCG (bacille Calmette-Guerin) and corynebacterium parvum. Such adjuvants are also well known in the art.

[0249] Monoclonal antibodies can be prepared using a wide variety of techniques known in the art including the use of hybridoma, recombinant, and phage display technologies, or a combination thereof. For example, monoclonal antibodies can be produced using hybridoma techniques including those known in the art and taught, for example, in Harlow et al., Antibodies: A Laboratory Manual, (Cold Spring Harbor Laboratory Press, 2nd ed. 1988); Hammerling, et al., in: Monoclonal Antibodies and T-Cell Hybridomas 563-681 (Elsevier, N.Y., 1981) (said references incorporated by reference in their entireties). The term “monoclonal antibody” as used herein is not limited to antibodies produced through hybridoma technology. The term “monoclonal antibody” refers to an antibody that is derived from a single clone, including any eukaryotic, prokaryotic, or phage clone, and not the method by which it is produced.

[0250] Methods for producing and screening for specific antibodies using hybridoma technology are routine and well known in the art and are discussed in detail in the Examples. In a non-limiting example, mice can be immunized with a polypeptide of the invention or a cell expressing such peptide. Once an immune response is detected, e.g., antibodies specific for the antigen are detected in the mouse serum, the mouse spleen is harvested and splenocytes isolated. The splenocytes are then fused by well known techniques to any suitable myeloma cells, for example cells from cell line SP20 available from the ATCC. Hybridomas are selected and cloned by limited dilution. The hybridoma clones are then assayed by methods known in the art for cells that secrete antibodies capable of binding a polypeptide of the invention. Ascites fluid, which generally contains high levels of antibodies, can be generated by immunizing mice with positive hybridoma clones.

[0251] Accordingly, the present invention provides methods of generating monoclonal antibodies as well as antibodies produced by the method comprising culturing a hybridoma cell secreting an antibody of the invention wherein, preferably, the hybridoma is generated by fusing splenocytes isolated from a mouse immunized with an antigen of the invention with myeloma cells and then screening the hybridomas resulting from the fusion for hybridoma clones that secrete an antibody able to bind a polypeptide of the invention.

[0252] Another well known method for producing both polyclonal and monoclonal human B cell lines is transformation using Epstein Barr Virus (EBV). Protocols for generating EBV-transformed B cell lines are commonly known in the art, such as, for example, the protocol outlined in Chapter 7.22 of Current Protocols in Immunology, Coligan et al., Eds., 1994, John Wiley & Sons, NY, which is hereby incorporated in its entirety by reference herein. The source of B cells for transformation is commonly human peripheral blood, but B cells for transformation may also be derived from other sources including, but not limited to, lymph nodes, tonsil, spleen, tumor tissue, and infected tissues. Tissues are generally made into single cell suspensions prior to EBV transformation. Additionally, steps may be taken to either physically remove or inactivate T cells (e.g., by treatment with cyclosporin A) in B cell-containing samples, because T cells from individuals seropositive for anti-EBV antibodies can suppress B cell immortalization by EBV.

[0253] In general, the sample containing human B cells is innoculated with EBV, and cultured for 3-4 weeks. A typical source of EBV is the culture supernatant of the B95-8 cell line (ATCC #VR-1492). Physical signs of EBV transformation can generally be seen towards the end of the 3-4 week culture period. By phase-contrast microscopy, transformed cells may appear large, clear, hairy and tend to aggregate in tight clusters of cells. Initially, EBV lines are generally polyclonal. However, over prolonged periods of cell cultures, EBV lines may become monoclonal or polyclonal as a result of the selective outgrowth of particular B cell clones. Alternatively, polyclonal EBV transformed lines may be subcloned (e.g., by limiting dilution culture) or fused with a suitable fusion partner and plated at limiting dilution to obtain monoclonal B cell lines. Suitable fusion partners for EBV transformed cell lines include mouse myeloma cell lines (e.g., SP2/0, X63-Ag8.653), heteromyeloma cell lines (human x mouse; e.g, SPAM-8, SBC-H20, and CB-F7), and human cell lines (e.g., GM 1500, SKO-007, RPMI 8226, and KR-4). Thus, the present invention also provides a method of generating polyclonal or monoclonal human antibodies against polypeptides of the invention or fragments thereof, comprising EBV-transformation of human B cells.

[0254] Antibody fragments, which recognize specific epitopes may be generated by known techniques. For example, Fab and F(ab′)2 fragments of the invention may be produced by proteolytic cleavage of immunoglobulin molecules, using enzymes such as papain (to produce Fab fragments) or pepsin (to produce F(ab′)2 fragments). F(ab′)2 fragments contain the variable region, the light chain constant region and the CH1 domain of the heavy chain. For example, the antibodies of the present invention can also be generated using various phage display methods known in the art and as discussed in detail in the Examples (e.g., Example 10). In phage display methods, functional antibody domains are displayed on the surface of phage particles, which carry the polynucleotide sequences encoding them. In a particular embodiment, such phage can be utilized to display antigen binding domains expressed from a repertoire or combinatorial antibody library (e.g., human or murine). Phage expressing an antigen binding domain that binds the antigen of interest can be selected or identified with antigen, e.g., using labeled antigen or antigen bound or captured to a solid surface or bead. Phage used in these methods are typically filamentous phage including fd and M13 binding domains expressed from phage with Fab, Fv or disulfide stabilized Fv antibody domains recombinantly fused to either the phage gene III or gene VIII protein. Examples of phage display methods that can be used to make the antibodies of the present invention include those disclosed in Brinkman et al., J. Immunol. Methods 182:41-50 (1995); Ames et al., J. Immunol. Methods 184:177-186 (1995); Kettleborough et al., Eur. J. Immunol. 24:952-958 (1994); Persic et al., Gene 187 9-18 (1997); Burton et al., Advances in Immunology 57:191-280 (1994); PCT application No. PCT/GB91/01134; PCT publications WO 90/02809; WO 91/10737; WO 92/01047; WO 92/18619; WO 93/11236; WO 95/15982; WO 95/20401; and U.S. Pat. Nos. 5,698,426; 5,223,409; 5,403,484; 5,580,717; 5,427,908; 5,750,753; 5,821,047; 5,571,698; 5,427,908; 5,516,637; 5,780,225; 5,658,727; 5,733,743 and 5,969,108; each of which is incorporated herein by reference in its entirety.

[0255] As described in the above references, after phage selection, the antibody coding regions from the phage can be isolated and used to generate whole antibodies, including human antibodies, or any other desired antigen binding fragment, and expressed in any desired host, including mammalian cells, insect cells, plant cells, yeast, and bacteria, e.g., as described in detail below. For example, techniques to recombinantly produce Fab, Fab′ and F(ab′)2 fragments can also be employed using methods known in the art such as those disclosed in PCT publication WO 92/22324; Mullinax et al., BioTechniques 12(6):864-869 (1992); and Sawai et al., AJRI 34:26-34 (1995); and Better et al., Science 240:1041-1043 (1988) (said references incorporated by reference in their entireties).

[0256] Examples of techniques which can be used to produce single-chain Fvs and antibodies include those described in U.S. Pat. Nos. 4,946,778 and 5,258,498; Huston et al., Methods in Enzymology 203:46-88 (1991); Shu et al., PNAS 90:7995-7999 (1993); and Skerra et al., Science 240:1038-1040 (1988). For some uses, including in vivo use of antibodies in humans and in vitro detection assays, it may be preferable to use chimeric, humanized, or human antibodies. A chimeric antibody is a molecule in which different portions of the antibody are derived from different animal species, such as antibodies having a variable region derived from a murine monoclonal antibody and a human immunoglobulin constant region. Methods for producing chimeric antibodies are known in the art. See e.g., Morrison, Science 229:1202 (1985); Oi et al., BioTechniques 4:214 (1986); Gillies et al., (1989) J. Immunol. Methods 125:191-202; U.S. Pat. Nos. 5,807,715; 4,816,567; and 4,816397, which are incorporated herein by reference in their entirety. Humanized antibodies are antibody molecules from non-human species antibody that binds the desired antigen having one or more complementarity determining regions (CDRs) from the non-human species and a framework regions from a human immunoglobulin molecule. Often, framework residues in the human framework regions will be substituted with the corresponding residue from the CDR donor antibody to alter, preferably improve, antigen binding. These framework substitutions are identified by methods well known in the art, e.g., by modeling of the interactions of the CDR and framework residues to identify framework residues important for antigen binding and sequence comparison to identify unusual framework residues at particular positions. (See, e.g., Queen et al., U.S. Pat. No. 5,585,089; Riechmann et al., Nature 332:323 (1988), which are incorporated herein by reference in their entireties.) Antibodies can be humanized using a variety of techniques known in the art including, for example, CDR-grafting (EP 239,400; PCT publication WO 91/09967; U.S. Pat. Nos. 5,225,539; 5,530,101; and 5,585,089), veneering or resurfacing (EP 592,106; EP 519,596; Padlan, Molecular Immunology 28(4/5):489-498 (1991); Studnicka et al., Protein Engineering 7(6):805-814 (1994); Roguska. et al., PNAS 91:969-973 (1994)), and chain shuffling (U.S. Pat. No. 5,565,332).

[0257] Completely human antibodies are particularly desirable for therapeutic treatment of human patients. Human antibodies can be made by a variety of methods known in the art including phage display methods described above using antibody libraries derived from human immunoglobulin sequences. See also, U.S. Pat. Nos. 4,444,887 and 4,716,111; and PCT publications WO 98/46645, WO 98/50433, WO 98/24893, WO 98/16654, WO 96/34096, WO 96/33735, and WO 91/10741; each of which is incorporated herein by reference in its entirety.

[0258] Human antibodies can also be produced using transgenic mice which are incapable of expressing functional endogenous immunoglobulins, but which can express human immunoglobulin genes. For example, the human heavy and light chain immunoglobulin gene complexes may be introduced randomly or by homologous recombination into mouse embryonic stem cells. Alternatively, the human variable region, constant region, and diversity region may be introduced into mouse embryonic stem cells in addition to the human heavy and light chain genes. The mouse heavy and light chain immunoglobulin genes may be rendered non-functional separately or simultaneously with the introduction of human immunoglobulin loci by homologous recombination. In particular, homozygous deletion of the JH region prevents endogenous antibody production. The modified embryonic stem cells are expanded and microinjected into blastocysts to produce chimeric mice. The chimeric mice are then bred to produce homozygous offspring, which express human antibodies. The transgenic mice are immunized in the normal fashion with a selected antigen, e.g., all or a portion of a polypeptide of the invention. Monoclonal antibodies directed against the antigen can be obtained from the immunized, transgenic mice using conventional hybridoma technology. The human immunoglobulin transgenes harbored by the transgenic mice rearrange during B cell differentiation, and subsequently undergo class switching and somatic mutation. Thus, using such a technique, it is possible to produce therapeutically useful IgG, IgA, IgM and IgE antibodies. For an overview of this technology for producing human antibodies, see Lonberg and Huszar, Int. Rev. Immunol. 13:65-93 (1995). For a detailed discussion of this technology for producing human antibodies and human monoclonal antibodies and protocols for producing such antibodies, see, e.g., PCT publications WO 98/24893; WO 92/01047; WO 96/34096; WO 96/33735; European Patent No. 0 598 877; U.S. Pat. Nos. 5,413,923; 5,625,126; 5,633,425; 5,569,825; 5,661,016; 5,545,806; 5,814,318; 5,885,793; 5,916,771; 5,939,598; 6,075,181 and 6,114,598, which are incorporated by reference herein in their entirety. In addition, companies such as Abgenix, Inc. (Freemont, Calif.) and Genpharm (San Jose, Calif.) can be engaged to provide human antibodies directed against a selected antigen using technology similar to that described above.

[0259] Completely human antibodies, which recognize a selected epitope can be generated using a technique referred to as “guided selection.” In this approach a selected non-human monoclonal antibody, e.g., a mouse antibody, is used to guide the selection of a completely human antibody recognizing the same epitope. (Jespers et al., Bio/technology 12:899-903 (1988)).

[0260] Further, antibodies to the polypeptides of the invention can, in turn, be utilized to generate anti-idiotype antibodies that “mimic” polypeptides of the invention using techniques well known to those skilled in the art. (See, e.g., Greenspan & Bona, FASEB J. 7(5):437-444; (1989) and Nissinoff, J. Immunol. 147(8):2429-2438 (1991)). For example, antibodies which bind to and competitively inhibit polypeptide multimerization and/or binding of a polypeptide of the invention to a ligand can be used to generate anti-idiotypes that “mimic” the polypeptide multimerization and/or binding domain and, as a consequence, bind to and neutralize polypeptide and/or its ligand. Such neutralizing anti-idiotypes or Fab fragments of such anti-idiotypes can be used in therapeutic regimens to neutralize polypeptide ligand/receptor. For example, such anti-idiotypic antibodies can be used to bind a polypeptide of the invention and/or to bind its ligand(s)/receptor(s), and thereby block its biological activity. Alternatively, antibodies, which bind to and enhance polypeptide multimerization and/or binding, and/or receptor/ligand multimerization, binding and/or signaling can be used to generate anti-idiotypes that function as agonists of a polypeptide of the invention and/or its ligand/receptor. Such agonistic anti-idiotypes or Fab fragments of such anti-idiotypes can be used in therapeutic regimens as agonists of the polypeptides of the invention or its ligand(s)/receptor(s). For example, such anti-idiotypic antibodies can be used to bind a polypeptide of the invention and/or to bind its ligand(s)/receptor(s), and thereby promote or enhance its biological activity.

[0261] Intrabodies of the invention can be produced using methods known in the art, such as those disclosed and reviewed in Chen et al., Hum. Gene Ther. 5:595-601 (1994); Marasco, W. A., Gene Ther. 4:11-15 (1997); Rondon and Marasco, Annu. Rev. Microbiol. 51:257-283 (1997); Proba et al., J. Mol. Biol. 275:245-253 (1998); Cohen et al., Oncogene 17:2445-2456 (1998); Ohage and Steipe, J. Mol. Biol. 291:1119-1128 (1999); Ohage et al., J. Mol. Biol. 291:1129-1134 (1999); Wirtz and Steipe, Protein Sci. 8:2245-2250 (1999); Zhu et al., J. Immunol. Methods 231:207-222 (1999); and references cited therein.

[0262] Polynucleotides Encoding Antibodies

[0263] The invention further provides polynucleotides comprising a nucleotide sequence encoding an antibody of the invention and fragments thereof. The invention also encompasses polynucleotides that hybridize under stringent or alternatively, under lower stringency hybridization conditions, e.g., as defined supra, to polynucleotides that encode an antibody, preferably, that specifically binds to a polypeptide of the invention, preferably, an antibody that binds to a polypeptide having the amino acid sequence of SEQ ID NO:Y, to a polypeptide encoded by a portion of SEQ ID NO:X as defined in columns 8 and 9 of Table 2, and/or to a polypeptide encoded by the cDNA contained in Clone ID NO:Z.

[0264] The polynucleotides may be obtained, and the nucleotide sequence of the polynucleotides determined, by any method known in the art. For example, if the nucleotide sequence of the antibody is known, a polynucleotide encoding the antibody may be assembled from chemically synthesized oligonucleotides (e.g., as described in Kutmeier et al., BioTechniques 17:242 (1994)), which, briefly, involves the synthesis of overlapping oligonucleotides containing portions of the sequence encoding the antibody, annealing and ligating of those oligonucleotides, and then amplification of the ligated oligonucleotides by PCR.

[0265] Alternatively, a polynucleotide encoding an antibody may be generated from nucleic acid from a suitable source. If a clone containing a nucleic acid encoding a particular antibody is not available, but the sequence of the antibody molecule is known, a nucleic acid encoding the immunoglobulin may be chemically synthesized or obtained from a suitable source (e.g., an antibody cDNA library, or a cDNA library generated from, or nucleic acid, preferably poly A+ RNA, isolated from, any tissue or cells expressing the antibody, such as hybridoma cells selected to express an antibody of the invention) by PCR amplification using synthetic primers hybridizable to the 3′ and 5′ ends of the sequence or by cloning using an oligonucleotide probe specific for the particular gene sequence to identify, e.g., a cDNA clone from a cDNA library that encodes the antibody. Amplified nucleic acids generated by PCR may then be cloned into replicable cloning vectors using any method well known in the art.

[0266] Once the nucleotide sequence and corresponding amino acid sequence of the antibody is determined, the nucleotide sequence of the antibody may be manipulated using methods well known in the art for the manipulation of nucleotide sequences, e.g., recombinant DNA techniques, site directed mutagenesis, PCR, etc. (see, for example, the techniques described in Sambrook et al., 1990, Molecular Cloning, A Laboratory Manual, 2d Ed., Cold Spring Harbor Laboratory, Cold Spring Harbor, N.Y. and Ausubel et al., eds., 1998, Current Protocols in Molecular Biology, John Wiley & Sons, NY, which are both incorporated by reference herein in their entireties), to generate antibodies having a different amino acid sequence, for example to create amino acid substitutions, deletions, and/or insertions.

[0267] In a specific embodiment, the amino acid sequence of the heavy and/or light chain variable domains may be inspected to identify the sequences of the complementarity determining regions (CDRs) by methods that are well know in the art, e.g., by comparison to known amino acid sequences of other heavy and light chain variable regions to determine the regions of sequence hypervariability. Using routine recombinant DNA techniques, one or more of the CDRs may be inserted within framework regions, e.g., into human framework regions to humanize a non-human antibody, as described supra. The framework regions may be naturally occurring or consensus framework regions, and preferably human framework regions (see, e.g., Chothia et al., J. Mol. Biol. 278: 457-479 (1998) for a listing of human framework regions). Preferably, the polynucleotide generated by the combination of the framework regions and CDRs encodes an antibody that specifically binds a polypeptide of the invention. Preferably, as discussed supra, one or more amino acid substitutions may be made within the framework regions, and, preferably, the amino acid substitutions improve binding of the antibody to its antigen. Additionally, such methods may be used to make amino acid substitutions or deletions of one or more variable region cysteine residues participating in an intrachain disulfide bond to generate antibody molecules lacking one or more intrachain disulfide bonds. Other alterations to the polynucleotide are encompassed by the present invention and within the skill of the art.

[0268] In addition, techniques developed for the production of “chimeric antibodies” (Morrison et al., Proc. Natl. Acad. Sci. 81:851-855 (1984); Neuberger et al., Nature 312:604-608 (1984); Takeda et al., Nature 314:452-454 (1985)) by splicing genes from a mouse antibody molecule of appropriate antigen specificity together with genes from a human antibody molecule of appropriate biological activity can be used. As described supra, a chimeric antibody is a molecule in which different portions are derived from different animal species, such as those having a variable region derived from a murine mAb and a human immunoglobulin constant region, e.g., humanized antibodies.

[0269] Alternatively, techniques described for the production of single chain antibodies (U.S. Pat. No. 4,946,778; Bird, Science 242:423-42 (1988); Huston et al., Proc. Natl. Acad. Sci. USA 85:5879-5883 (1988); and Ward et al., Nature 334:544-54 (1989)) can be adapted to produce single chain antibodies. Single chain antibodies are formed by linking the heavy and light chain fragments of the Fv region via an amino acid bridge, resulting in a single chain polypeptide. Techniques for the assembly of functional Fv fragments in E. coli may also be used (Skerra et al., Science 242:1038-1041 (1988)).

[0270] Methods of Producing Antibodies

[0271] The antibodies of the invention can be produced by any method known in the art for the synthesis of antibodies, in particular, by chemical synthesis or preferably, by recombinant expression techniques. Methods of producing antibodies include, but are not limited to, hybridoma technology, EBV transformation, and other methods discussed herein as well as through the use recombinant DNA technology, as discussed below.

[0272] Recombinant expression of an antibody of the invention, or fragment, derivative or analog thereof, (e.g., a heavy or light chain of an antibody of the invention or a single chain antibody of the invention), requires construction of an expression vector containing a polynucleotide that encodes the antibody. Once a polynucleotide encoding an antibody molecule or a heavy or light chain of an antibody, or portion thereof (preferably containing the heavy or light chain variable domain), of the invention has been obtained, the vector for the production of the antibody molecule may be produced by recombinant DNA technology using techniques well known in the art. Thus, methods for preparing a protein by expressing a polynucleotide containing an antibody encoding nucleotide sequence are described herein. Methods, which are well known to those skilled in the art can be used to construct expression vectors containing antibody coding sequences and appropriate transcriptional and translational control signals. These methods include, for example, in vitro recombinant DNA techniques, synthetic techniques, and in vivo genetic recombination. The invention, thus, provides replicable vectors comprising a nucleotide sequence encoding an antibody molecule of the invention, or a heavy or light chain thereof, or a heavy or light chain variable domain, operably linked to a promoter. Such vectors may include the nucleotide sequence encoding the constant region of the antibody molecule (see, e.g., PCT Publication WO 86/05807; PCT Publication WO 89/01036; and U.S. Pat. No. 5,122,464) and the variable domain of the antibody may be cloned into such a vector for expression of the entire heavy or light chain.

[0273] The expression vector is transferred to a host cell by conventional techniques and the transfected cells are then cultured by conventional techniques to produce an antibody of the invention. Thus, the invention includes host cells containing a polynucleotide encoding an antibody of the invention, or a heavy or light chain thereof, or a single chain antibody of the invention, operably linked to a heterologous promoter. In preferred embodiments for the expression of double-chained antibodies, vectors encoding both the heavy and light chains may be co-expressed in the host cell for expression of the entire immunoglobulin molecule, as detailed below.

[0274] A variety of host-expression vector systems may be utilized to express the antibody molecules of the invention. Such host-expression systems represent vehicles by which the coding sequences of interest may be produced and subsequently purified, but also represent cells which may, when transformed or transfected with the appropriate nucleotide coding sequences, express an antibody molecule of the invention in situ. These include but are not limited to microorganisms such as bacteria (e.g., E. coli, B. subtilis) transformed with recombinant bacteriophage DNA, plasmid DNA or cosmid DNA expression vectors containing antibody coding sequences; yeast (e.g., Saccharomyces, Pichia) transformed with recombinant yeast expression vectors containing antibody coding sequences; insect cell systems infected with recombinant virus expression vectors (e.g., baculovirus) containing antibody coding sequences; plant cell systems infected with recombinant virus expression vectors (e.g., cauliflower mosaic virus, CaMV; tobacco mosaic virus, TMV) or transformed with recombinant plasmid expression vectors (e.g., Ti plasmid) containing antibody coding sequences; or mammalian cell systems (e.g., COS, CHO, BHK, 293, 3T3 cells) harboring recombinant expression constructs containing promoters derived from the genome of mammalian cells (e.g., metallothionein promoter) or from mammalian viruses (e.g., the adenovirus late promoter; the vaccinia virus 7.5K promoter). Preferably, bacterial cells such as Escherichia coli, and more preferably, eukaryotic cells, especially for the expression of whole recombinant antibody molecule, are used for the expression of a recombinant antibody molecule. For example, mammalian cells such as Chinese hamster ovary cells (CHO), in conjunction with a vector such as the major intermediate early gene promoter element from human cytomegalovirus is an effective expression system for antibodies (Foecking et al., Gene 45:101 (1986); Cockett et al., Bio/Technology 8:2 (1990)).

[0275] In bacterial systems, a number of expression vectors may be advantageously selected depending upon the use intended for the antibody molecule being expressed. For example, when a large quantity of such a protein is to be produced, for the generation of pharmaceutical compositions of an antibody molecule, vectors which direct the expression of high levels of fusion protein products that are readily purified may be desirable. Such vectors include, but are not limited, to the E. coli expression vector pUR278 (Ruther et al., EMBO J. 2:1791 (1983)), in which the antibody coding sequence may be ligated individually into the vector in frame with the lac Z coding region so that a fusion protein is produced; pIN vectors (Inouye & Inouye, Nucleic Acids Res. 13:3101-3109 (1985); Van Heeke & Schuster, J. Biol. Chem. 24:5503-5509 (1989)); and the like. pGEX vectors may also be used to express foreign polypeptides as fusion proteins with glutathione S-transferase (GST). In general, such fusion proteins are soluble and can easily be purified from lysed cells by adsorption and binding to matrix glutathione-agarose beads followed by elution in the presence of free glutathione. The pGEX vectors are designed to include thrombin or factor Xa protease cleavage sites so that the cloned target gene product can be released from the GST moiety.

[0276] In an insect system, Autographa californica nuclear polyhedrosis virus (AcNPV) is used as a vector to express foreign genes. The virus grows in Spodoptera frugiperda cells. The antibody coding sequence may be cloned individually into non-essential regions (for example the polyhedrin gene) of the virus and placed under control of an AcNPV promoter (for example the polyhedrin promoter).

[0277] In mammalian host cells, a number of viral-based expression systems may be utilized. In cases where an adenovirus is used as an expression vector, the antibody coding sequence of interest may be ligated to an adenovirus transcription/translation control complex, e.g., the late promoter and tripartite leader sequence. This chimeric gene may then be inserted in the adenovirus genome by in vitro or in vivo recombination. Insertion in a non-essential region of the viral genome (e.g., region E1 or E3) will result in a recombinant virus that is viable and capable of expressing the antibody molecule in infected hosts. (e.g., see Logan & Shenk, Proc. Natl. Acad. Sci. USA 81:355-359 (1984)). Specific initiation signals may also be required for efficient translation of inserted antibody coding sequences. These signals include the ATG initiation codon and adjacent sequences. Furthermore, the initiation codon must be in phase with the reading frame of the desired coding sequence to ensure translation of the entire insert. These exogenous translational control signals and initiation codons can be of a variety of origins, both natural and synthetic. The efficiency of expression may be enhanced by the inclusion of appropriate transcription enhancer elements, transcription terminators, etc. (see Bittner et al., Methods in Enzymol. 153:51-544 (1987)).

[0278] In addition, a host cell strain may be chosen, which modulates the expression of the inserted sequences, or modifies and processes the gene product in the specific fashion desired. Such modifications (e.g., glycosylation) and processing (e.g., cleavage) of protein products may be important for the function of the protein. Different host cells have characteristic and specific mechanisms for the post-translational processing and modification of proteins and gene products. Appropriate cell lines or host systems can be chosen to ensure the correct modification and processing of the foreign protein expressed. To this end, eukaryotic host cells which possess the cellular machinery for proper processing of the primary transcript, glycosylation, and phosphorylation of the gene product may be used. Such mammalian host cells include but are not limited to CHO, VERY, BHK, Hela, COS, MDCK, 293, 3T3, WI38, and in particular, breast cancer cell lines such as, for example, BT483, Hs578T, HTB2, BT20 and T47D, and normal mammary gland cell line such as, for example, CRL7030 and Hs578Bst.

[0279] For long-term, high-yield production of recombinant proteins, stable expression is preferred. For example, cell lines, which stably express the antibody molecule may be engineered. Rather than using expression vectors which contain viral origins of replication, host cells can be transformed with DNA controlled by appropriate expression control elements (e.g., promoter, enhancer, sequences, transcription terminators, polyadenylation sites, etc.), and a selectable marker. Following the introduction of the foreign DNA, engineered cells may be allowed to grow for 1-2 days in an enriched media, and then are switched to a selective media. The selectable marker in the recombinant plasmid confers resistance to the selection and allows cells to stably integrate the plasmid into their chromosomes and grow to form foci which in turn can be cloned and expanded into cell lines. This method may advantageously be used to engineer cell lines which express the antibody molecule. Such engineered cell lines may be particularly useful in screening and evaluation of compounds that interact directly or indirectly with the antibody molecule.

[0280] A number of selection systems may be used, including but not limited to the herpes simplex virus thymidine kinase (Wigler et al., Cell 11:223 (1977)), hypoxanthine-guanine phosphoribosyltransferase (Szybalska & Szybalski, Proc. Natl. Acad. Sci. USA 48:202 (1992)), and adenine phosphoribosyltransferase (Lowy et al., Cell 22:817 (1980)) genes can be employed in tk-, hgprt- or aprt-cells, respectively. Also, antimetabolite resistance can be used as the basis of selection for the following genes: dhfr, which confers resistance to methotrexate (Wigler et al., Natl. Acad. Sci. USA 77:357 (1980); O'Hare et al., Proc. Natl. Acad. Sci. USA 78:1527 (1981)); gpt, which confers resistance to mycophenolic acid (Mulligan & Berg, Proc. Natl. Acad. Sci. USA 78:2072 (1981)); neo, which confers resistance to the aminoglycoside G-418 Clinical Pharmacy 12:488-505; Wu and Wu, Biotherapy 3:87-95 (1991); Tolstoshev, Ann. Rev. Pharmacol. Toxicol. 32:573-596 (1993); Mulligan, Science 260:926-932 (1993); and Morgan and Anderson, Ann. Rev. Biochem. 62:191-217 (1993); TIB TECH 11(5):155-215 (1993)); and hygro, which confers resistance to hygromycin (Santerre et al., Gene 30:147 (1984)). Methods commonly known in the art of recombinant DNA technology may be routinely applied to select the desired recombinant clone, and such methods are described, for example, in Ausubel et al. (eds.), Current Protocols in Molecular Biology, John Wiley & Sons, NY (1993); Kriegler, Gene Transfer and Expression, A Laboratory Manual, Stockton Press, NY (1990); and in Chapters 12 and 13, Dracopoli et al. (eds), Current Protocols in Human Genetics, John Wiley & Sons, NY (1994); Colberre-Garapin et al., J. Mol. Biol. 150:1 (1981), which are incorporated by reference herein in their entireties.

[0281] The expression levels of an antibody molecule can be increased by vector amplification (for a review, see Bebbington and Hentschel, The use of vectors based on gene amplification for the expression of cloned genes in mammalian cells in DNA cloning, Vol.3. (Academic Press, New York, 1987)). When a marker in the vector system expressing antibody is amplifiable, increase in the level of inhibitor present in culture of host cell will increase the number of copies of the marker gene. Since the amplified region is associated with the antibody gene, production of the antibody will also increase (Crouse et al., Mol. Cell. Biol. 3:257 (1983)).

[0282] Vectors which use glutamine synthase (GS) or DHFR as the selectable markers can be amplified in the presence of the drugs methionine sulphoximine or methotrexate, respectively. An advantage of glutamine synthase based vectors is the availabilty of cell lines (e.g., the murine myeloma cell line, NS0) which are glutamine synthase negative. Glutamine synthase expression systems can also function in glutamine synthase expressing cells (e.g., Chinese Hamster Ovary (CHO) cells) by providing additional inhibitor to prevent the functioning of the endogenous gene. A glutamine synthase expression system and components thereof are detailed in PCT publications: WO87/04462; WO86/05807; WO89/01036; WO89/10404; and WO91/06657 which are incorporated in their entireties by reference herein. Additionally, glutamine synthase expression vectors that may be used according to the present invention are commercially available from suplliers, including, for example Lonza Biologics, Inc. (Portsmouth, N.H.). Expression and production of monoclonal antibodies using a GS expression system in murine myeloma cells is described in Bebbington et al., Bio/technology 10:169(1992) and in Biblia and Robinson Biotechnol. Prog. 11:1 (1995) which are incorporated in their entirities by reference herein.

[0283] The host cell may be co-transfected with two expression vectors of the invention, the first vector encoding a heavy chain derived polypeptide and the second vector encoding a light chain derived polypeptide. The two vectors may contain identical selectable markers, which enable equal expression of heavy and light chain polypeptides. Alternatively, a single vector may be used which encodes, and is capable of expressing, both heavy and light chain polypeptides. In such situations, the light chain should be placed before the heavy chain to avoid an excess of toxic free heavy chain (Proudfoot, Nature 322:52 (1986); Kohler, Proc. Natl. Acad. Sci. USA 77:2197 (1980)). The coding sequences for the heavy and light chains may comprise cDNA or genomic DNA.

[0284] Once an antibody molecule of the invention has been produced by an animal, chemically synthesized, or recombinantly expressed, it may be purified by any method known in the art for purification of an immunoglobulin molecule, for example, by chromatography (e.g., ion exchange, affinity, particularly by affinity for the specific antigen after Protein A, and sizing column chromatography), centrifugation, differential solubility, or by any other standard technique for the purification of proteins. In addition, the antibodies of the present invention or fragments thereof can be fused to heterologous polypeptide sequences described herein or otherwise known in the art, to facilitate purification.

[0285] The present invention encompasses antibodies recombinantly fused or chemically conjugated (including both covalently and non-covalently conjugations) to a polypeptide (or portion thereof, preferably at least 10, 20, 30, 40, 50, 60, 70, 80, 90 or 100 amino acids of the polypeptide) of the present invention to generate fusion proteins. The fusion does not necessarily need to be direct, but may occur through linker sequences. The antibodies may be specific for antigens other than polypeptides (or portion thereof, preferably at least 10, 20, 30, 40, 50, 60, 70, 80, 90 or 100 amino acids of the polypeptide) of the present invention. For example, antibodies may be used to target the polypeptides of the present invention to particular cell types, either in vitro or in vivo, by fusing or conjugating the polypeptides of the present invention to antibodies specific for particular cell surface receptors. Antibodies fused or conjugated to the polypeptides of the present invention may also be used in in vitro immunoassays and purification methods using methods known in the art. See e.g., Harbor et al., supra, and PCT publication WO 93/21232; EP 439,095; Naramura et al., Immunol. Lett. 39:91-99 (1994); U.S. Pat. No. 5,474,981; Gillies et al., PNAS 89:1428-1432 (1992); Fell et al., J. Immunol. 146:2446-2452 (1991), which are incorporated by reference in their entireties.

[0286] The present invention further includes compositions comprising the polypeptides of the present invention fused or conjugated to antibody domains other than the variable regions. For example, the polypeptides of the present invention may be fused or conjugated to an antibody Fc region, or portion thereof. The antibody portion fused to a polypeptide of the present invention may comprise the constant region, hinge region, CH1 domain, CH2 domain, and CH3 domain or any combination of whole domains or portions thereof. The polypeptides may also be fused or conjugated to the above antibody portions to form multimers. For example, Fc portions fused to the polypeptides of the present invention can form dimers through disulfide bonding between the Fc portions. Higher multimeric forms can be made by fusing the polypeptides to portions of IgA and IgM. Methods for fusing or conjugating the polypeptides of the present invention to antibody portions are known in the art. See, e.g., U.S. Pat. Nos. 5,336,603; 5,622,929; 5,359,046; 5,349,053; 5,447,851; 5,112,946; EP 307,434; EP 367,166; PCT publications WO 96/04388; WO 91/06570; Ashkenazi et al., Proc. Natl. Acad. Sci. USA 88:10535-10539 (1991); Zheng et al., J. Immunol. 154:5590-5600 (1995); and Vil et al., Proc. Natl. Acad. Sci. USA 89:11337-11341 (1992) (said references incorporated by reference in their entireties).

[0287] As discussed, supra, the polypeptides corresponding to a polypeptide, polypeptide fragment, or a variant of SEQ ID NO:Y may be fused or conjugated to the above antibody portions to increase the in vivo half life of the polypeptides or for use in immunoassays using methods known in the art. Further, the polypeptides corresponding to SEQ ID NO:Y may be fused or conjugated to the above antibody portions to facilitate purification. One reported example describes chimeric proteins consisting of the first two domains of the human CD4-polypeptide and various domains of the constant regions of the heavy or light chains of mammalian immunoglobulins. See EP 394,827; Traunecker et al., Nature 331:84-86 (1988). The polypeptides of the present invention fused or conjugated to an antibody having disulfide-linked dimeric structures (due to the IgG) may also be more efficient in binding and neutralizing other molecules, than the monomeric secreted protein or protein fragment alone. See, for example, Fountoulakis et al., J. Biochem. 270:3958-3964 (1995). In many cases, the Fc part in a fusion protein is beneficial in therapy and diagnosis, and thus can result in, for example, improved pharmacokinetic properties. See, for example, EP A 232,262. Alternatively, deleting the Fc part after the fusion protein has been expressed, detected, and purified, would be desired. For example, the Fc portion may hinder therapy and diagnosis if the fusion protein is used as an antigen for immunizations. In drug discovery, for example, human proteins, such as hIL-5, have been fused with Fc portions for the purpose of high-throughput screening assays to identify antagonists of hIL-5. (See, Bennett et al., J. Molecular Recognition 8:52-58 (1995); Johanson et al., J. Biol. Chem. 270:9459-9471 (1995)).

[0288] Moreover, the antibodies or fragments thereof of the present invention can be fused to marker sequences, such as a peptide to facilitate purification. In preferred embodiments, the marker amino acid sequence is a hexa-histidine peptide, such as the tag provided in a pQE vector (QIAGEN, Inc., 9259 Eton Avenue, Chatsworth, Calif., 91311), among others, many of which are commercially available. As described in Gentz et al., Proc. Natl. Acad. Sci. USA 86:821-824 (1989), for instance, hexa-histidine provides for convenient purification of the fusion protein. Other peptide tags useful for purification include, but are not limited to, the “HA” tag, which corresponds to an epitope derived from the influenza hemagglutinin protein (Wilson et al., Cell 37:767 (1984)) and the “flag” tag.

[0289] The present invention further encompasses antibodies or fragments thereof conjugated to a diagnostic or therapeutic agent. The antibodies can be used diagnostically to, for example, monitor the development or progression of a tumor as part of a clinical testing procedure to, e.g., determine the efficacy of a given treatment regimen. Detection can be facilitated by coupling the antibody to a detectable substance. Examples of detectable substances include various enzymes, prosthetic groups, fluorescent materials, luminescent materials, bioluminescent materials, radioactive materials, positron emitting metals using various positron emission tomographies, and nonradioactive paramagnetic metal ions. The detectable substance may be coupled or conjugated either directly to the antibody (or fragment thereof) or indirectly, through an intermediate (such as, for example, a linker known in the art) using techniques known in the art. See, for example, U.S. Pat. No. 4,741,900 for metal ions which can be conjugated to antibodies for use as diagnostics according to the present invention.

[0290] Further, an antibody or fragment thereof may be conjugated to a therapeutic moiety such as a cytotoxin, e.g., a cytostatic or cytocidal agent, a therapeutic agent or a radioactive metal ion, e.g., alpha-emitters such as, for example, 213Bi. A cytotoxin or cytotoxic agent includes any agent that is detrimental to cells. Examples include paclitaxol, cytochalasin B, gramicidin D, ethidium bromide, emetine, mitomycin, etoposide, tenoposide, vincristine, vinblastine, colchicin, doxorubicin, daunorubicin, dihydroxy anthracin dione, mitoxantrone, mithramycin, actinomycin D, 1-dehydrotestosterone, glucocorticoids, procaine, tetracaine, lidocaine, propranolol, and puromycin and analogs or homologs thereof. Therapeutic agents include, but are not limited to, antimetabolites (e.g., methotrexate, 6-mercaptopurine, 6-thioguanine, cytarabine, 5-fluorouracil decarbazine), alkylating agents (e.g., mechlorethamine, thioepa chlorambucil, melphalan, carmustine (BSNU) and lomustine (CCNU), cyclothosphamide, busulfan, dibromomannitol, streptozotocin, mitomycin C, and cis-dichlorodiamine platinum (II) (DDP) cisplatin), anthracyclines (e.g., daunorubicin (formerly daunomycin) and doxorubicin), antibiotics (e.g., dactinomycin (formerly actinomycin), bleomycin, mithramycin, and anthramycin (AMC)), and anti-mitotic agents (e.g., vincristine and vinblastine).

[0291] The conjugates of the invention can be used for modifying a given biological response, the therapeutic agent or drug moiety is not to be construed as limited to classical chemical therapeutic agents. For example, the drug moiety may be a protein or polypeptide possessing a desired biological activity. Such proteins may include, for example, a toxin such as abrin, ricin A, pseudomonas exotoxin, or diphtheria toxin; a protein such as tumor necrosis factor, a-interferon, β-interferon, nerve growth factor, platelet derived growth factor, tissue plasminogen activator, an apoptotic agent, e.g., TNF-alpha, TNF-beta, AIM I (See, International Publication No. WO 97/33899), AIM II (See, International Publication No. WO 97/34911), Fas Ligand (Takahashi et al., Int. Immunol., 6:1567-1574 (1994)), VEGI (See, International Publication No. WO 99/23105), a thrombotic agent or an anti-angiogenic agent, e.g., angiostatin or endostatin; or, biological response modifiers such as, for example, lymphokines, interleukin-1 (“IL-1”), interleukin-2 (“IL-2”), interleukin-6 (“IL-6”), granulocyte macrophage colony stimulating factor (“GM-CSF”), granulocyte colony stimulating factor (“G-CSF”), or other growth factors.

[0292] Antibodies may also be attached to solid supports, which are particularly useful for immunoassays or purification of the target antigen. Such solid supports include, but are not limited to, glass, cellulose, polyacrylamide, nylon, polystyrene, polyvinyl chloride or polypropylene.

[0293] Techniques for conjugating such therapeutic moiety to antibodies are well known. See, for example., Arnon et al., “Monoclonal Antibodies For Immunotargeting Of Drugs In Cancer Therapy”, in Monoclonal Antibodies And Cancer Therapy, Reisfeld et al. (eds.), pp. 243-56 (Alan R. Liss, Inc. 1985); Hellstrom et al., “Antibodies For Drug Delivery”, in Controlled Drug Delivery (2nd Ed.), Robinson et al. (eds.), pp. 623-53 (Marcel Dekker, Inc. 1987); Thorpe, “Antibody Carriers Of Cytotoxic Agents In Cancer Therapy: A Review”, in Monoclonal Antibodies '84: Biological And Clinical Applications, Pinchera et al. (eds.), pp. 475-506 (1985); “Analysis, Results, And Future Prospective Of The Therapeutic Use Of Radiolabeled Antibody In Cancer Therapy”, in Monoclonal Antibodies For Cancer Detection And Therapy, Baldwin et al. (eds.), pp. 303-16 (Academic Press 1985), and Thorpe et al., “The Preparation And Cytotoxic Properties Of Antibody-Toxin Conjugates”, Immunol. Rev. 62:119-58 (1982).

[0294] Alternatively, an antibody can be conjugated to a second antibody to form an antibody heteroconjugate as described by Segal in U.S. Pat. No. 4,676,980, which is incorporated herein by reference in its entirety.

[0295] An antibody, with or without a therapeutic moiety conjugated to it, administered alone or in combination with cytotoxic factor(s) and/or cytokine(s) can be used as a therapeutic.

[0296] Immunophenotyping

[0297] The antibodies of the invention may be utilized for immunophenotyping of cell lines and biological samples. Translation products of the genes of the present invention may be useful as cell specific markers, or more specifically as cellular markers that are differentially expressed at various stages of differentiation and/or maturation of particular cell types. Monoclonal antibodies directed against a specific epitope, or combination of epitopes, will allow for the screening of cellular populations expressing the marker. Various techniques can be utilized using monoclonal antibodies to screen for cellular populations expressing the marker(s), and include magnetic separation using antibody-coated magnetic beads, “panning” with antibody attached to a solid matrix (i.e., plate), and flow cytometry (See, e.g., U.S. Pat. No. 5,985,660; and Morrison et al., Cell, 96:737-49 (1999)).

[0298] These techniques allow for the screening of particular populations of cells, such as might be found with hematological malignancies (i.e. minimal residual disease (MRD) in acute leukemic patients) and “non-self” cells in transplantations to prevent Graft-versus-Host Disease (GVHD). Alternatively, these techniques allow for the screening of hematopoietic stem and progenitor cells capable of undergoing proliferation and/or differentiation, as might be found in human umbilical cord blood.

[0299] Assays For Antibody Binding

[0300] The antibodies of the invention may be assayed for immunospecific binding by any method known in the art. The immunoassays which can be used include but are not limited to competitive and non-competitive assay systems using techniques such as western blots, radioimmunoassays, ELISA (enzyme linked immunosorbent assay), “sandwich” immunoassays, immunoprecipitation assays, precipitin reactions, gel diffusion precipitin reactions, immunodiffusion assays, agglutination assays, complement-fixation assays, immunoradiometric assays, fluorescent immunoassays, and protein A immunoassays, to name but a few. Such assays are routine and well known in the art (see, e.g., Ausubel et al, eds, 1994, Current Protocols in Molecular Biology, Vol. 1, John Wiley & Sons, Inc., New York, which is incorporated by reference herein in its entirety). Exemplary immunoassays are described briefly below (but are not intended by way of limitation).

[0301] Immunoprecipitation protocols generally comprise lysing a population of cells in a lysis buffer such as RIPA buffer (1% NP-40 or Triton X-100, 1% sodium deoxycholate, 0.1% SDS, 0.15 M NaCl, 0.01 M sodium phosphate at pH 7.2, 1% Trasylol) supplemented with protein phosphatase and/or protease inhibitors (e.g., EDTA, PMSF, aprotinin, sodium vanadate), adding the antibody of interest to the cell lysate, incubating for a period of time (e.g., 1-4 hours) at 4° C., adding protein A and/or protein G sepharose beads to the cell lysate, incubating for about an hour or more at 4° C., washing the beads in lysis buffer and resuspending the beads in SDS/sample buffer. The ability of the antibody of interest to immunoprecipitate a particular antigen can be assessed by, e.g., western blot analysis. One of skill in the art would be knowledgeable as to the parameters that can be modified to increase the binding of the antibody to an antigen and decrease the background (e.g., pre-clearing the cell lysate with sepharose beads). For further discussion regarding immunoprecipitation protocols see, e.g., Ausubel et al., eds., (1994), Current Protocols in Molecular Biology, Vol. 1, John Wiley & Sons, Inc., New York, section 10.16.1.

[0302] Western blot analysis generally comprises preparing protein samples, electrophoresis of the protein samples in a polyacrylamide gel (e.g., 8%-20% SDS-PAGE depending on the molecular weight of the antigen), transferring the protein sample from the polyacrylamide gel to a membrane such as nitrocellulose, PVDF or nylon, blocking the membrane in blocking solution (e.g., PBS with 3% BSA or non-fat milk), washing the membrane in washing buffer (e.g., PBS-Tween 20), blocking the membrane with primary antibody (the antibody of interest) diluted in blocking buffer, washing the membrane in washing buffer, blocking the membrane with a secondary antibody (which recognizes the primary antibody, e.g., an anti-human antibody) conjugated to an enzymatic substrate (e.g., horseradish peroxidase or alkaline phosphatase) or radioactive molecule (e.g., 32P or 125I) diluted in blocking buffer, washing the membrane in wash buffer, and detecting the presence of the antigen. One of skill in the art would be knowledgeable as to the parameters that can be modified to increase the signal detected and to reduce the background noise. For further discussion regarding western blot protocols see, e.g., Ausubel et al., eds., (1994), Current Protocols in Molecular Biology, Vol. 1, John Wiley & Sons, Inc., New York, section 10.8.1.

[0303] ELISAs comprise preparing antigen, coating the well of a 96 well microtiter plate with the antigen, adding the antibody of interest conjugated to a detectable compound such as an enzymatic substrate (e.g., horseradish peroxidase or alkaline phosphatase) to the well and incubating for a period of time, and detecting the presence of the antigen. In ELISAs the antibody of interest does not have to be conjugated to a detectable compound; instead, a second antibody (which recognizes the antibody of interest) conjugated to a detectable compound may be added to the well. Further, instead of coating the well with the antigen, the antibody may be coated to the well. In this case, a second antibody conjugated to a detectable compound may be added following the addition of the antigen of interest to the coated well. One of skill in the art would be knowledgeable as to the parameters that can be modified to increase the signal detected as well as other variations of ELISAs known in the art. For further discussion regarding ELISAs see, e.g., Ausubel et al., eds., (1994), Current Protocols in Molecular Biology, Vol. 1, John Wiley & Sons, Inc., New York, section 11.2.1.

[0304] The binding affinity of an antibody to an antigen and the off-rate of an antibody-antigen interaction can be determined by competitive binding assays. One example of a competitive binding assay is a radioimmunoassay comprising the incubation of labeled antigen (e.g., 3H or 125I) with the antibody of interest in the presence of increasing amounts of unlabeled antigen, and the detection of the antibody bound to the labeled antigen. The affinity of the antibody of interest for a particular antigen and the binding off-rates can be determined from the data by scatchard plot analysis. Competition with a second antibody can also be determined using radioimmunoassays. In this case, the antigen is incubated with antibody of interest conjugated to a labeled compound (e.g., 3H or 125I) in the presence of increasing amounts of an unlabeled second antibody.

[0305] Antibodies of the invention may be characterized using immunocytochemisty methods on cells (e.g., mammalian cells, such as CHO cells) transfected with a vector enabling the expression of a respiratory system antigen or with vector alone using techniques commonly known in the art. Antibodies that bind respiratory system antigen transfected cells, but not vector-only transfected cells, are respiratory system antigen specific.

[0306] Therapeutic Uses

[0307] The present invention is further directed to antibody-based therapies which involve administering antibodies of the invention to an animal, preferably a mammal, and most preferably a human, patient for treating one or more of the disclosed diseases, disorders, or conditions. Therapeutic compounds of the invention include, but are not limited to, antibodies of the invention (including fragments, analogs and derivatives thereof as described herein) and nucleic acids encoding antibodies of the invention (including fragments, analogs and derivatives thereof and anti-idiotypic antibodies as described herein). The antibodies of the invention can be used to treat, inhibit or prevent diseases, disorders or conditions associated with aberrant expression and/or activity of a polypeptide of the invention, including, but not limited to, any one or more of the diseases, disorders, or conditions described herein. The treatment and/or prevention of diseases, disorders, or conditions associated with aberrant expression and/or activity of a polypeptide of the invention includes, but is not limited to, alleviating symptoms associated with those diseases, disorders or conditions. Antibodies of the invention may be provided in pharmaceutically acceptable compositions as known in the art or as described herein.

[0308] In a specific and preferred embodiment, the present invention is directed to antibody-based therapies which involve administering antibodies of the invention to an animal, preferably a mammal, and most preferably a human, patient for treating one or more of the diseases, disorders, or conditions of the respiratory system, including, but not limited to, throat disorders (e.g., vocal cord paralysis, tonsillitis, and larynigitis), lung disorders (e.g., pneumonia, allegeric disorders (e.g., asthma and eosionphilic pheumonia), pleurisy, cystic fibrosis, emphysema, histiocytosis X, and sarcoidosis), nose disorders (rhinitis and sinusitis), neoplasms and/or cancers of respiratory tissues (e.g., throat cancer, lung cancer, and cancer of the nose), and/or those disorders as described under “Respiratory Disorders”. Therapeutic compounds of the invention include, but are not limited to, antibodies of the invention (e.g., antibodies directed to the full length protein expressed on the cell surface of a mammalian cell; antibodies directed to an epitope of a respiratory system associated polypeptide of the invention (such as, a linear epitope (shown in Table 1A, column 6) or a conformational epitope), including fragments, analogs and derivatives thereof as described herein) and nucleic acids encoding antibodies of the invention (including fragments, analogs and derivatives thereof and anti-idiotypic antibodies as described herein). The antibodies of the invention can be used to treat, inhibit or prevent diseases, disorders or conditions associated with aberrant expression and/or activity of a polypeptide of the invention, including, but not limited to, any one or more of the diseases, disorders, or conditions of the respiratory system described herein. The treatment and/or prevention of diseases, disorders, or conditions of the respiratory system associated with aberrant expression and/or activity of a polypeptide of the invention includes, but is not limited to, alleviating symptoms associated with those diseases, disorders or conditions. Antibodies of the invention may be provided in pharmaceutically acceptable compositions as known in the art or as described herein.

[0309] A summary of the ways in which the antibodies of the present invention may be used therapeutically includes binding polynucleotides or polypeptides of the present invention locally or systemically in the body or by direct cytotoxicity of the antibody, e.g. as mediated by complement (CDC) or by effector cells (ADCC). Some of these approaches are described in more detail below. Armed with the teachings provided herein, one of ordinary skill in the art will know how to use the antibodies of the present invention for diagnostic, monitoring or therapeutic purposes without undue experimentation.

[0310] The antibodies of this invention may be advantageously utilized in combination with other monoclonal or chimeric antibodies, or with lymphokines or hematopoietic growth factors (such as, e.g., IL-2, IL-3 and IL-7), for example, which serve to increase the number or activity of effector cells which interact with the antibodies.

[0311] The antibodies of the invention may be administered alone or in combination with other types of treatments (e.g., radiation therapy, chemotherapy, hormonal therapy, immunotherapy and anti-tumor agents). Generally, administration of products of a species origin or species reactivity (in the case of antibodies) that is the same species as that of the patient is preferred. Thus, in a preferred embodiment, human antibodies, fragments derivatives, analogs, or nucleic acids, are administered to a human patient for therapy or prophylaxis.

[0312] It is preferred to use high affinity and/or potent in vivo inhibiting and/or neutralizing antibodies against polypeptides or polynucleotides of the present invention, fragments or regions thereof, for both immunoassays directed to and therapy of disorders related to polynucleotides or polypeptides, including fragments thereof, of the present invention. Such antibodies, fragments, or regions, will preferably have an affinity for polynucleotides or polypeptides of the invention, including fragments thereof. Preferred binding affinities include those with a dissociation constant or Kd less than 5×10⁻² M, 10⁻² M, 5×10⁻³ M, 10⁻³ M, 5×10⁻⁴ M, 10⁻⁴ M, 5×10⁻⁵ M, 10⁻⁵ M, 5×10⁻⁶ M, 10⁻⁶ M, 5×10⁻⁷ M, 10⁻⁷ M, 5×10⁻⁸ M, 10⁻⁸ M, 5×10⁻⁹ M, 10⁻⁹ M, 5×10⁻¹⁰ M, 10⁻¹⁰ M, 5×10⁻¹¹ M, 10⁻¹¹ M, 5×10⁻¹² M, 10⁻¹² M, 5×10⁻¹³ M, 10⁻¹³ M, 5×10⁻¹⁴ M, 10⁻¹⁴ M, 5×10⁻¹⁵ M, and 10⁻¹⁵ M.

[0313] Gene Therapy

[0314] In a specific embodiment, nucleic acids comprising sequences encoding antibodies or functional derivatives thereof, are administered to treat, inhibit or prevent a disease or disorder associated with aberrant expression and/or activity of a polypeptide of the invention, by way of gene therapy. Gene therapy refers to therapy performed by the administration to a subject of an expressed or expressible nucleic acid. In this embodiment of the invention, the nucleic acids produce their encoded protein that mediates a therapeutic effect.

[0315] Any of the methods for gene therapy available in the art can be used according to the present invention. Exemplary methods are described below.

[0316] For general reviews of the methods of gene therapy, see Goldspiel et al., Clinical Pharmacy 12:488-505 (1993); Wu and Wu, Biotherapy 3:87-95 (1991); Tolstoshev, Ann. Rev. Pharmacol. Toxicol. 32:573-596 (1993); Mulligan, Science 260:926-932 (1993); and Morgan and Anderson, Ann. Rev. Biochem. 62:191-217 (1993); May, TIBTECH 11(5):155-215 (1993). Methods commonly known in the art of recombinant DNA technology which can be used are described in Ausubel et al. (eds.), Current Protocols in Molecular Biology, John Wiley & Sons, NY (1993); and Kriegler, Gene Transfer and Expression, A Laboratory Manual, Stockton Press, NY (1990).

[0317] In a preferred embodiment, the compound comprises nucleic acid sequences encoding an antibody, said nucleic acid sequences being part of expression vectors that express the antibody or fragments or chimeric proteins or heavy or light chains thereof in a suitable host. In particular, such nucleic acid sequences have promoters operably linked to the antibody coding region, said promoter being inducible or constitutive, and, optionally, tissue-specific. In another particular embodiment, nucleic acid molecules are used in which the antibody coding sequences and any other desired sequences are flanked by regions that promote homologous recombination at a desired site in the genome, thus providing for intrachromosomal expression of the antibody encoding nucleic acids (Koller and Smithies, Proc. Natl. Acad. Sci. USA 86:8932-8935 (1989); Zijlstra et al., Nature 342:435-438 (1989). In specific embodiments, the expressed antibody molecule is a single chain antibody; alternatively, the nucleic acid sequences include sequences encoding both the heavy and light chains, or fragments thereof, of the antibody.

[0318] Delivery of the nucleic acids into a patient may be either direct, in which case the patient is directly exposed to the nucleic acid or nucleic acid-carrying vectors, or indirect, in which case, cells are first transformed with the nucleic acids in vitro, then transplanted into the patient. These two approaches are known, respectively, as in vivo or ex vivo gene therapy.

[0319] In a specific embodiment, the nucleic acid sequences are directly administered in vivo, where it is expressed to produce the encoded product. This can be accomplished by any of numerous methods known in the art, e.g., by constructing them as part of an appropriate nucleic acid expression vector and administering it so that they become intracellular, e.g., by infection using defective or attenuated retrovirals or other viral vectors (see U.S. Pat. No. 4,980,286), or by direct injection of naked DNA, or by use of microparticle bombardment (e.g., a gene gun; Biolistic, Dupont), or coating with lipids or cell-surface receptors or transfecting agents, encapsulation in liposomes, microparticles, or microcapsules, or by administering them in linkage to a peptide which is known to enter the nucleus, by administering it in linkage to a ligand subject to receptor-mediated endocytosis (see, e.g., Wu and Wu, J. Biol. Chem. 262:4429-4432 (1987)) (which can be used to target cell types specifically expressing the receptors), etc. In another embodiment, nucleic acid-ligand complexes can be formed in which the ligand comprises a fusogenic viral peptide to disrupt endosomes, allowing the nucleic acid to avoid lysosomal degradation. In yet another embodiment, the nucleic acid can be targeted in vivo for cell specific uptake and expression, by targeting a specific receptor (see, e.g., PCT Publications WO 92/06180; WO 92/22635; WO92/20316; WO93/14188, WO 93/20221). Alternatively, the nucleic acid can be introduced intracellularly and incorporated within host cell DNA for expression, by homologous recombination (Koller and Smithies, Proc. Natl. Acad. Sci. USA 86:8932-8935 (1989); Zijlstra et al., Nature 342:435-438 (1989)).

[0320] In a specific embodiment, viral vectors that contains nucleic acid sequences encoding an antibody of the invention are used. For example, a retroviral vector can be used (see Miller et al., Meth. Enzymol. 217:581-599 (1993)). These retroviral vectors contain the components necessary for the correct packaging of the viral genome and integration into the host cell DNA. The nucleic acid sequences encoding the antibody to be used in gene therapy are cloned into one or more vectors, which facilitates delivery of the gene into a patient. More detail about retroviral vectors can be found in Boesen et al., Biotherapy 6:291-302 (1994), which describes the use of a retroviral vector to deliver the mdrl gene to hematopoietic stem cells in order to make the stem cells more resistant to chemotherapy. Other references illustrating the use of retroviral vectors in gene therapy are: Clowes et al., J. Clin. Invest. 93:644-651 (1994); Kiem et al., Blood 83:1467-1473 (1994); Salmons and Gunzberg, Human Gene Therapy 4:129-141 (1993); and Grossman and Wilson, Curr. Opin. in Genetics and Devel. 3:110-114 (1993).

[0321] Adenoviruses are other viral vectors that can be used in gene therapy. Adenoviruses are especially attractive vehicles for delivering genes to respiratory epithelia. Adenoviruses naturally infect respiratory epithelia where they cause a mild disease. Other targets for adenovirus-based delivery systems are liver, the central nervous system, endothelial cells, and muscle. Adenoviruses have the advantage of being capable of infecting non-dividing cells. Kozarsky and Wilson, Current Opinion in Genetics and Development 3:499-503 (1993) present a review of adenovirus-based gene therapy. Bout et al., Human Gene Therapy 5:3-10 (1994) demonstrated the use of adenovirus vectors to transfer genes to the respiratory epithelia of rhesus monkeys. Other instances of the use of adenoviruses in gene therapy can be found in Rosenfeld et al., Science 252:431-434 (1991); Rosenfeld et al., Cell 68:143-155 (1992); Mastrangeli et al., J. Clin. Invest. 91:225-234 (1993); PCT Publication WO94/12649; and Wang, et al., Gene Therapy 2:775-783 (1995). In a preferred embodiment, adenovirus vectors are used.

[0322] Adeno-associated virus (AAV) has also been proposed for use in gene therapy (Walsh et al., Proc. Soc. Exp. Biol. Med. 204:289-300 (1993); U.S. Pat. No. 5,436,146).

[0323] Another approach to gene therapy involves transferring a gene to cells in tissue culture by such methods as electroporation, lipofection, calcium phosphate mediated transfection, or viral infection. Usually, the method of transfer includes the transfer of a selectable marker to the cells. The cells are then placed under selection to isolate those cells that have taken up and are expressing the transferred gene. Those cells are then delivered to a patient.

[0324] In this embodiment, the nucleic acid is introduced into a cell prior to administration in vivo of the resulting recombinant cell. Such introduction can be carried out by any method known in the art, including but not limited to transfection, electroporation, microinjection, infection with a viral or bacteriophage vector containing the nucleic acid sequences, cell fusion, chromosome-mediated gene transfer, microcell-mediated gene transfer, spheroplast fusion, etc. Numerous techniques are known in the art for the introduction of foreign genes into cells (see, e.g., Loeffler and Behr, Meth. Enzymol. 217:599-618 (1993); Cohen et al., Meth. Enzymol. 217:618-644 (1993); Cline, Pharmac. Ther. 29:69-92m (1985) and may be used in accordance with the present invention, provided that the necessary developmental and physiological functions of the recipient cells are not disrupted. The technique should provide for the stable transfer of the nucleic acid to the cell, so that the nucleic acid is expressible by the cell and preferably heritable and expressible by its cell progeny.

[0325] The resulting recombinant cells can be delivered to a patient by various methods known in the art. Recombinant blood cells (e.g., hematopoietic stem or progenitor cells) are preferably administered intravenously. The amount of cells envisioned for use depends on the desired effect, patient state, etc., and can be determined by one skilled in the art.

[0326] Cells into which a nucleic acid can be introduced for purposes of gene therapy encompass any desired, available cell type, and include but are not limited to epithelial cells, endothelial cells, keratinocytes, fibroblasts, muscle cells, hepatocytes; blood cells such as T lymphocytes, B lymphocytes, monocytes, macrophages, neutrophils, eosinophils, megakaryocytes, granulocytes; various stem or progenitor cells, in particular hematopoietic stem or progenitor cells, e.g., as obtained from bone marrow, umbilical cord blood, peripheral blood, fetal liver, etc.

[0327] In a preferred embodiment, the cell used for gene therapy is autologous to the patient.

[0328] In an embodiment in which recombinant cells are used in gene therapy, nucleic acid sequences encoding an antibody are introduced into the cells such that they are expressible by the cells or their progeny, and the recombinant cells are then administered in vivo for therapeutic effect. In a specific embodiment, stem or progenitor cells are used. Any stem and/or progenitor cells which can be isolated and maintained in vitro can potentially be used in accordance with this embodiment of the present invention (see e.g. PCT Publication WO 94/08598; Stemple and Anderson, Cell 71:973-985 (1992); Rheinwald, Meth. Cell Bio. 21A:229 (1980); and Pittelkow and Scott, Mayo Clinic Proc. 61:771 (1986)).

[0329] In a specific embodiment, the nucleic acid to be introduced for purposes of gene therapy comprises an inducible promoter operably linked to the coding region, such that expression of the nucleic acid is controllable by the presence or absence of an appropriate inducer of transcription.

[0330] Demonstration of Therapeutic or Prophylactic Activity

[0331] The compounds or pharmaceutical compositions of the invention are preferably tested in vitro, and then in vivo for the desired therapeutic or prophylactic activity, prior to use in humans. For example, in vitro assays to demonstrate the therapeutic or prophylactic utility of a compound or pharmaceutical composition include, the effect of a compound on a cell line or a patient tissue sample. The effect of the compound or composition on the cell line and/or tissue sample can be determined utilizing techniques known to those of skill in the art including, but not limited to, rosette formation assays and cell lysis assays. In accordance with the invention, in vitro assays which can be used to determine whether administration of a specific compound is indicated, include in vitro cell culture assays in which a patient tissue sample is grown in culture, and exposed to or otherwise administered a compound, and the effect of such compound upon the tissue sample is observed.

[0332] Therapeutic/Prophylactic Administration and Composition

[0333] The invention provides methods of treatment, inhibition and prophylaxis by administration to a subject of an effective amount of a compound or pharmaceutical composition of the invention, preferably a polypeptide or antibody of the invention. In a preferred embodiment, the compound is substantially purified (e.g., substantially free from substances that limit its effect or produce undesired side-effects). The subject is preferably an animal, including but not limited to animals such as cows, pigs, horses, chickens, cats, dogs, etc., and is preferably a mammal, and most preferably human.

[0334] Formulations and methods of administration that can be employed when the compound comprises a nucleic acid or an immunoglobulin are described above; additional appropriate formulations and routes of administration can be selected from among those described herein below.

[0335] Various delivery systems are known and can be used to administer a compound of the invention, e.g., encapsulation in liposomes, microparticles, microcapsules, recombinant cells capable of expressing the compound, receptor-mediated endocytosis (see, e.g., Wu and Wu, J. Biol. Chem. 262:4429-4432 (1987)), construction of a nucleic acid as part of a retroviral or other vector, etc. Methods of introduction include but are not limited to intradermal, intramuscular, intraperitoneal, intravenous, subcutaneous, intranasal, epidural, and oral routes. The compounds or compositions may be administered by any convenient route, for example by infusion or bolus injection, by absorption through epithelial or mucocutaneous linings (e.g., oral mucosa, rectal and intestinal mucosa, etc.) and may be administered together with other biologically active agents. Administration can be systemic or local. In addition, it may be desirable to introduce the pharmaceutical compounds or compositions of the invention into the central nervous system by any suitable route, including intraventricular and intrathecal injection; intraventricular injection may be facilitated by an intraventricular catheter, for example, attached to a reservoir, such as an Ommaya reservoir. Pulmonary administration can also be employed, e.g., by use of an inhaler or nebulizer, and formulation with an aerosolizing agent.

[0336] In a specific embodiment, it may be desirable to administer the pharmaceutical compounds or compositions of the invention locally to the area in need of treatment; this may be achieved by, for example, and not by way of limitation, local infusion during surgery, topical application, e.g., in conjunction with a wound dressing after surgery, by injection, by means of a catheter, by means of a suppository, or by means of an implant, said implant being of a porous, non-porous, or gelatinous material, including membranes, such as sialastic membranes, or fibers. Preferably, when administering a protein, including an antibody, of the invention, care must be taken to use materials to which the protein does not absorb.

[0337] In another embodiment, the compound or composition can be delivered in a vesicle, in particular a liposome (see Langer, Science 249:1527-1533 (1990); Treat et al., in Liposomes in the Therapy of Infectious Disease and Cancer, Lopez-Berestein and Fidler (eds.), Liss, New York, pp. 353-365 (1989); Lopez-Berestein, ibid., pp. 317-327; see generally ibid.)

[0338] In yet another embodiment, the compound or composition can be delivered in a controlled release system. In one embodiment, a pump may be used (see Langer, supra; Sefton, CRC Crit. Ref. Biomed. Eng. 14:201 (1987); Buchwald et al., Surgery 88:507 (1980); Saudek et al., N. Engl. J. Med. 321:574 (1989)). In another embodiment, polymeric materials can be used (see Medical Applications of Controlled Release, Langer and Wise (eds.), CRC Pres., Boca Raton, Fla. (1974); Controlled Drug Bioavailability, Drug Product Design and Performance, Smolen and Ball (eds.), Wiley, New York (1984); Ranger and Peppas, J., Macromol. Sci. Rev. Macromol. Chem. 23:61 (1983); see also Levy et al., Science 228:190 (1985); During et al., Ann. Neurol. 25:351 (1989); Howard et al., J.Neurosurg. 71:105 (1989)). In yet another embodiment, a controlled release system can be placed in proximity of the therapeutic target, e.g., the brain, thus requiring only a fraction of the systemic dose (see, e.g., Goodson, in Medical Applications of Controlled Release, supra, vol. 2, pp. 115-138 (1984)).

[0339] Other controlled release systems are discussed in the review by Langer (Science 249:1527-1533 (1990)).

[0340] In a specific embodiment where the compound of the invention is a nucleic acid encoding a protein, the nucleic acid can be administered in vivo to promote expression of its encoded protein, by constructing it as part of an appropriate nucleic acid expression vector and administering it so that it becomes intracellular, e.g., by use of a retroviral vector (see U.S. Pat. No. 4,980,286), or by direct injection, or by use of microparticle bombardment (e.g., a gene gun; Biolistic, Dupont), or coating with lipids or cell-surface receptors or transfecting agents, or by administering it in linkage to a homeobox-like peptide which is known to enter the nucleus (see e.g., Joliot et al., Proc. Natl. Acad. Sci. USA 88:1864-1868 (1991)), etc. Alternatively, a nucleic acid can be introduced intracellularly and incorporated within host cell DNA for expression, by homologous recombination.

[0341] The present invention also provides pharmaceutical compositions. Such compositions comprise a therapeutically effective amount of a compound, and a pharmaceutically acceptable carrier. In a specific embodiment, the term “pharmaceutically acceptable” means approved by a regulatory agency of the Federal or a state government or listed in the U.S. Pharmacopeia or other generally recognized pharmacopeia for use in animals, and more particularly in humans. The term “carrier” refers to a diluent, adjuvant, excipient, or vehicle with which the therapeutic is administered. Such pharmaceutical carriers can be sterile liquids, such as water and oils, including those of petroleum, animal, vegetable or synthetic origin, such as peanut oil, soybean oil, mineral oil, sesame oil and the like. Water is a preferred carrier when the pharmaceutical composition is administered intravenously. Saline solutions and aqueous dextrose and glycerol solutions can also be employed as liquid carriers, particularly for injectable solutions. Suitable pharmaceutical excipients include starch, glucose, lactose, sucrose, gelatin, malt, rice, flour, chalk, silica gel, sodium stearate, glycerol monostearate, talc, sodium chloride, dried skim milk, glycerol, propylene, glycol, water, ethanol and the like. The composition, if desired, can also contain minor amounts of wetting or emulsifying agents, or pH buffering agents. These compositions can take the form of solutions, suspensions, emulsion, tablets, pills, capsules, powders, sustained-release formulations and the like. The composition can be formulated as a suppository, with traditional binders and carriers such as triglycerides. Oral formulation can include standard carriers such as pharmaceutical grades of mannitol, lactose, starch, magnesium stearate, sodium saccharine, cellulose, magnesium carbonate, etc. Examples of suitable pharmaceutical carriers are described in “Remington's Pharmaceutical Sciences” by E. W. Martin. Such compositions will contain a therapeutically effective amount of the compound, preferably in purified form, together with a suitable amount of carrier so as to provide the form for proper administration to the patient. The formulation should suit the mode of administration.

[0342] In a preferred embodiment, the composition is formulated in accordance with routine procedures as a pharmaceutical composition adapted for intravenous administration to human beings. Typically, compositions for intravenous administration are solutions in sterile isotonic aqueous buffer. Where necessary, the composition may also include a solubilizing agent and a local anesthetic such as lignocaine to ease pain at the site of the injection. Generally, the ingredients are supplied either separately or mixed together in unit dosage form, for example, as a dry lyophilized powder or water free concentrate in a hermetically sealed container such as an ampoule or sachette indicating the quantity of active agent. Where the composition is to be administered by infusion, it can be dispensed with an infusion bottle containing sterile pharmaceutical grade water or saline. Where the composition is administered by injection, an ampoule of sterile water for injection or saline can be provided so that the ingredients may be mixed prior to administration.

[0343] The compounds of the invention can be formulated as neutral or salt forms. Pharmaceutically acceptable salts include those formed with anions such as those derived from hydrochloric, phosphoric, acetic, oxalic, tartaric acids, etc., and those formed with cations such as those derived from sodium, potassium, ammonium, calcium, ferric hydroxides, isopropylamine, triethylamine, 2-ethylamino ethanol, histidine, procaine, etc.

[0344] The amount of the compound of the invention, which will be effective in the treatment, inhibition and prevention of a disease or disorder associated with aberrant expression and/or activity of a polypeptide of the invention can be determined by standard clinical techniques. In addition, in vitro assays may optionally be employed to help identify optimal dosage ranges. The precise dose to be employed in the formulation will also depend on the route of administration, and the seriousness of the disease or disorder, and should be decided according to the judgment of the practitioner and each patient's circumstances. Effective doses may be extrapolated from dose-response curves derived from in vitro or animal model test systems.

[0345] For antibodies, the dosage administered to a patient is typically 0.1 mg/kg to 100 mg/kg of the patient's body weight. Preferably, the dosage administered to a patient is between 0.1 mg/kg and 20 mg/kg of the patient's body weight, more preferably 1 mg/kg to 10 mg/kg of the patient's body weight. Generally, human antibodies have a longer half-life within the human body than antibodies from other species due to the immune response to the foreign polypeptides. Thus, lower dosages of human antibodies and less frequent administration is often possible. Further, the dosage and frequency of administration of antibodies of the invention may be reduced by enhancing uptake and tissue penetration (e.g., into the brain) of the antibodies by modifications such as, for example, lipidation.

[0346] The invention also provides a pharmaceutical pack or kit comprising one or more containers filled with one or more of the ingredients of the pharmaceutical compositions of the invention. Optionally associated with such container(s) can be a notice in the form prescribed by a governmental agency regulating the manufacture, use or sale of pharmaceuticals or biological products, which notice reflects approval by the agency of manufacture, use or sale for human administration.

[0347] Diagnosis and Imaging

[0348] Labeled antibodies, and derivatives and analogs thereof, which specifically bind to a polypeptide of interest can be used for diagnostic purposes to detect, diagnose, or monitor diseases, disorders, and/or conditions associated with the aberrant expression and/or activity of a polypeptide of the invention. The invention provides for the detection of aberrant expression of a polypeptide of interest, comprising (a) assaying the expression of the polypeptide of interest in cells or body fluid of an individual using one or more antibodies specific to the polypeptide interest and (b) comparing the level of gene expression with a standard gene expression level, whereby an increase or decrease in the assayed polypeptide gene expression level compared to the standard expression level is indicative of aberrant expression.

[0349] The invention provides a diagnostic assay for diagnosing a respiratory system disorder, comprising (a) assaying the expression of the polypeptide of interest in cells or body fluid of an individual using one or more antibodies specific to the polypeptide interest and (b) comparing the level of gene expression with a standard gene expression level, whereby an increase or decrease in the assayed polypeptide gene expression level compared to the standard expression level is indicative of a particular disorder. With respect to cancer, the presence of a relatively high amount of transcript in biopsied tissue from an individual may indicate a predisposition for the development of the disease, or may provide a means for detecting the disease prior to the appearance of actual clinical symptoms. A more definitive diagnosis of this type may allow health professionals to employ preventative measures or aggressive treatment earlier thereby preventing the development or further progression of the cancer.

[0350] Antibodies of the invention can be used to assay protein levels in a biological sample using classical immunohistological methods known to those of skill in the art (e.g., see Jalkanen et al., J. Cell. Biol. 101:976-985 (1985); Jalkanen et al., J. Cell. Biol. 105:3087-3096 (1987)). Other antibody-based methods useful for detecting protein gene expression include immunoassays, such as the enzyme linked immunosorbent assay (ELISA) and the radioimmunoassay (RIA). Suitable antibody assay labels are known in the art and include enzyme labels, such as, glucose oxidase; radioisotopes, such as iodine (125I, 121I), carbon (14C), sulfur (35S), tritium (3H), indium (112In), and technetium (99Tc); luminescent labels, such as luminol; and fluorescent labels, such as fluorescein and rhodamine, and biotin.

[0351] One facet of the invention is the detection and diagnosis of a disease or disorder associated with aberrant expression of a polypeptide of interest in an animal, preferably a mammal and most preferably a human. A preferred embodiment of the invention is the detection and diagnosis of a disease or disorder of the respiratory system associated with aberrant expression of a respiratory system antigen in an animal, preferably a mammal and most preferably a human. In one embodiment, diagnosis comprises: a) administering (for example, parenterally, subcutaneously, or intraperitoneally) to a subject an effective amount of a labeled molecule which specifically binds to the polypeptide of interest; b) waiting for a time interval following the administering for permitting the labeled molecule to preferentially concentrate at sites in the subject where the polypeptide is expressed (and for unbound labeled molecule to be cleared to background level); c) determining background level; and d) detecting the labeled molecule in the subject, such that detection of labeled molecule above the background level indicates that the subject has a particular disease or disorder associated with aberrant expression of the polypeptide of interest. Background level can be determined by various methods including, comparing the amount of labeled molecule detected to a standard value previously determined for a particular system.

[0352] It will be understood in the art that the size of the subject and the imaging system used will determine the quantity of imaging moiety needed to produce diagnostic images. In the case of a radioisotope moiety, for a human subject, the quantity of radioactivity injected will normally range from about 5 to 20 millicuries of 99mTc. The labeled antibody or antibody fragment will then preferentially accumulate at the location of cells which contain the specific protein. In vivo tumor imaging is described in S. W. Burchiel et al., “Immunopharmacokinetics of Radiolabeled Antibodies and Their Fragments.” (Chapter 13 in Tumor Imaging: The Radiochemical Detection of Cancer, S. W. Burchiel and B. A. Rhodes, eds., Masson Publishing Inc. (1982)).

[0353] Depending on several variables, including the type of label used and the mode of administration, the time interval following the administration for permitting the labeled molecule to preferentially concentrate at sites in the subject and for unbound labeled molecule to be cleared to background level is 6 to 48 hours or 6 to 24 hours or 6 to 12 hours. In another embodiment the time interval following administration is 5 to 20 days or 5 to 10 days.

[0354] In an embodiment, monitoring of the disease or disorder is carried out by repeating the method for diagnosing the disease or disorder, for example, one month after initial diagnosis, six months after initial diagnosis, one year after initial diagnosis, etc.

[0355] Presence of the labeled molecule can be detected in the patient using methods known in the art for in vivo scanning. These methods depend upon the type of label used. Skilled artisans will be able to determine the appropriate method for detecting a particular label. Methods and devices that may be used in the diagnostic methods of the invention include, but are not limited to, computed tomography (CT), whole body scan such as position emission tomography (PET), magnetic resonance imaging (MRI), and sonography.

[0356] In a specific embodiment, the molecule is labeled with a radioisotope and is detected in the patient using a radiation responsive surgical instrument (Thurston et al., U.S. Pat. No. 5,441,050). In another embodiment, the molecule is labeled with a fluorescent compound and is detected in the patient using a fluorescence responsive scanning instrument. In another embodiment, the molecule is labeled with a positron emitting metal and is detected in the patent using positron emission-tomography. In yet another embodiment, the molecule is labeled with a paramagnetic label and is detected in a patient using magnetic resonance imaging (MRI).

[0357] Kits

[0358] The present invention provides kits that can be used in the above methods. In one embodiment, a kit comprises an antibody of the invention, preferably a purified antibody, in one or more containers. In a specific embodiment, the kits of the present invention contain a substantially isolated polypeptide comprising an epitope, which is specifically immunoreactive with an antibody included in the kit. Preferably, the kits of the present invention further comprise a control antibody, which does not react with the polypeptide of interest. In another specific embodiment, the kits of the present invention contain a means for detecting the binding of an antibody to a polypeptide of interest (e.g., the antibody may be conjugated to a detectable substrate such as a fluorescent compound, an enzymatic substrate, a radioactive compound or a luminescent compound, or a second antibody which recognizes the first antibody may be conjugated to a detectable substrate).

[0359] In another specific embodiment of the present invention, the kit is a diagnostic kit for use in screening serum containing antibodies specific against proliferative and/or cancerous polynucleotides and polypeptides. Such a kit may include a control antibody that does not react with the polypeptide of interest. Such a kit may include a substantially isolated polypeptide antigen comprising an epitope, which is specifically immunoreactive with at least one anti-polypeptide antigen antibody. Further, such a kit includes means for detecting the binding of said antibody to the antigen (e.g., the antibody may be conjugated to a fluorescent compound such as fluorescein or rhodamine, which can be detected by flow cytometry). In specific embodiments, the kit may include a recombinantly produced or chemically synthesized polypeptide antigen. The polypeptide antigen of the kit may also be attached to a solid support.

[0360] In a more specific embodiment the detecting means of the above-described kit includes a solid support to which said polypeptide antigen is attached. Such a kit may also include a non-attached reporter-labeled anti-human antibody. In this embodiment, binding of the antibody to the polypeptide antigen can be detected by binding of the said reporter-labeled antibody.

[0361] In an additional embodiment, the invention includes a diagnostic kit for use in screening serum containing antigens of the polypeptide of the invention. The diagnostic kit includes a substantially isolated antibody specifically immunoreactive with polypeptide or polynucleotide antigens, and means for detecting the binding of the polynucleotide or polypeptide antigen to the antibody. In one embodiment, the antibody is attached to a solid support. In a specific embodiment, the antibody may be a monoclonal antibody. The detecting means of the kit may include a second, labeled monoclonal antibody. Alternatively, or in addition, the detecting means may include a labeled, competing antigen.

[0362] In one diagnostic configuration, test serum is reacted with a solid phase reagent having a surface-bound antigen obtained by the methods of the present invention. After binding with specific antigen antibody to the reagent and removing unbound serum components by washing, the reagent is reacted with reporter-labeled anti-human antibody to bind reporter to the reagent in proportion to the amount of bound anti-antigen antibody on the solid support. The reagent is again washed to remove unbound labeled antibody, and the amount of reporter associated with the reagent is determined. Typically, the reporter is an enzyme, which is detected by incubating the solid phase in the presence of a suitable fluorometric, luminescent or colorimetric substrate (Sigma, St. Louis, Mo.).

[0363] The solid surface reagent in the above assay is prepared by known techniques for attaching protein material to solid support material, such as polymeric beads, dip sticks, 96-well plate or filter material. These attachment methods generally include non-specific adsorption of the protein to the support or covalent attachment of the protein, typically through a free amine group, to a chemically reactive group on the solid support, such as an activated carboxyl, hydroxyl, or aldehyde group. Alternatively, streptavidin coated plates can be used in conjunction with biotinylated antigen(s).

[0364] Thus, the invention provides an assay system or kit for carrying out this diagnostic method. The kit generally includes a support with surface-bound recombinant antigens, and a reporter-labeled anti-human antibody for detecting surface-bound anti-antigen antibody.

[0365] Uses of the Polynucleotides

[0366] Each of the polynucleotides identified herein can be used in numerous ways as reagents. The following description should be considered exemplary and utilizes known techniques.

[0367] The polynucleotides of the present invention are useful for chromosome identification. There exists an ongoing need to identify new chromosome markers, since few chromosome marking reagents, based on actual sequence data (repeat polymorphisms), are presently available. Each sequence is specifically targeted to and can hybridize with a particular location on an individual human chromosome, thus each polynucleotide of the present invention can routinely be used as a chromosome marker using techniques known in the art. Table 1A, column 8 provides the chromosome location of some of the polynucleotides of the invention.

[0368] Briefly, sequences can be mapped to chromosomes by preparing PCR primers (preferably at least 15 bp (e.g., 15-25 bp) from the sequences shown in SEQ ID NO:X. Primers can optionally be selected using computer analysis so that primers do not span more than one predicted exon in the genomic DNA. These primers are then used for PCR screening of somatic cell hybrids containing individual human chromosomes. Only those hybrids containing the human gene corresponding to SEQ ID NO:X will yield an amplified fragment.

[0369] Similarly, somatic hybrids provide a rapid method of PCR mapping the polynucleotides to particular chromosomes. Three or more clones can be assigned per day using a single thermal cycler. Moreover, sublocalization of the polynucleotides can be achieved with panels of specific chromosome fragments. Other gene mapping strategies that can be used include in situ hybridization, prescreening with labeled flow-sorted chromosomes, preselection by hybridization to construct chromosome specific-cDNA libraries, and computer mapping techniques (See, e.g., Shuler, Trends Biotechnol 16:456-459 (1998) which is hereby incorporated by reference in its entirety).

[0370] Precise chromosomal location of the polynucleotides can also be achieved using fluorescence in situ hybridization (FISH) of a metaphase chromosomal spread. This technique uses polynucleotides as short as 500 or 600 bases; however, polynucleotides 2,000-4,000 bp are preferred. For a review of this technique, see Verma et al., “Human Chromosomes: a Manual of Basic Techniques,” Pergamon Press, New York (1988).

[0371] For chromosome mapping, the polynucleotides can be used individually (to mark a single chromosome or a single site on that chromosome) or in panels (for marking multiple sites and/or multiple chromosomes).

[0372] Thus, the present invention also provides a method for chromosomal localization which involves (a) preparing PCR primers from the polynucleotide sequences in Table 1A and/or Table 2 and SEQ ID NO:X and (b) screening somatic cell hybrids containing individual chromosomes.

[0373] The polynucleotides of the present invention would likewise be useful for radiation hybrid mapping, HAPPY mapping, and long range restriction mapping. For a review of these techniques and others known in the art, see, e.g. Dear, “Genome Mapping: A Practical Approach,” IRL Press at Oxford University Press, London (1997); Aydin, J. Mol. Med. 77:691-694 (1999); Hacia et al., Mol. Psychiatry 3:483-492 (1998); Herrick et al., Chromosome Res. 7:409-423 (1999); Hamilton et al., Methods Cell Biol. 62:265-280 (2000); and/or Ott, J. Hered. 90:68-70 (1999), each of which is hereby incorporated by reference in its entirety.

[0374] Once a polynucleotide has been mapped to a precise chromosomal location, the physical position of the polynucleotide can be used in linkage analysis. Linkage analysis establishes coinheritance between a chromosomal location and presentation of a particular disease. (Disease mapping data are found, for example, in V. McKusick, Mendelian Inheritance in Man (available on line through Johns Hopkins University Welch Medical Library).) Column 9 of Table 1A provides an OMIM reference identification number of diseases associated with the cytologic band disclosed in column 8 of Table 1A, as determined using techniques described herein and by reference to Table 5. Assuming 1 megabase mapping resolution and one gene per 20 kb, a cDNA precisely localized to a chromosomal region associated with the disease could be one of 50-500 potential causative genes.

[0375] Thus, once coinheritance is established, differences in a polynucleotide of the invention and the corresponding gene between affected and unaffected individuals can be examined. First, visible structural alterations in the chromosomes, such as deletions or translocations, are examined in chromosome spreads or by PCR. If no structural alterations exist, the presence of point mutations are ascertained. Mutations observed in some or all affected individuals, but not in normal individuals, indicate that the mutation may cause the disease. However, complete sequencing of the polypeptide and the corresponding gene from several normal individuals is required to distinguish the mutation from a polymorphism. If a new polymorphism is identified, this polymorphic polypeptide can be used for further linkage analysis.

[0376] Furthermore, increased or decreased expression of the gene in affected individuals as compared to unaffected individuals can be assessed using the polynucleotides of the invention. Any of these alterations (altered expression, chromosomal rearrangement, or mutation) can be used as a diagnostic or prognostic marker. Diagnostic and prognostic methods, kits and reagents encompassed by the present invention are briefly described below and more thoroughly elsewhere herein (see e.g., the sections labeled “Antibodies”, “Diagnostic Assays”, and “Methods for Detecting Respiratory System Disease, Including Cancer”).

[0377] Thus, the invention also provides a diagnostic method useful during diagnosis of a disorder, involving measuring the expression level of polynucleotides of the present invention in cells or body fluid from an individual and comparing the measured gene expression level with a standard level of polynucleotide expression level, whereby an increase or decrease in the gene expression level compared to the standard is indicative of a disorder. Additional non-limiting examples of diagnostic methods encompassed by the present invention are more thoroughly described elsewhere herein (see, e.g., Example 12).

[0378] In still another embodiment, the invention includes a kit for analyzing samples for the presence of proliferative and/or cancerous polynucleotides derived from a test subject, as further described herein. In a general embodiment, the kit includes at least one polynucleotide probe containing a nucleotide sequence that will specifically hybridize with a polynucleotide of the invention and a suitable container. In a specific embodiment, the kit includes two polynucleotide probes defining an internal region of the polynucleotide of the invention, where each probe has one strand containing a 31′ mer-end internal to the region. In a further embodiment, the probes may be useful as primers for polymerase chain reaction amplification.

[0379] Where a diagnosis of a related disorder, including, for example, diagnosis of a tumor, has already been made according to conventional methods, the present invention is useful as a prognostic indicator, whereby patients exhibiting enhanced or depressed polynucleotide of the invention expression will experience a worse clinical outcome relative to patients expressing the gene at a level nearer the standard level.

[0380] By “measuring the expression level of polynucleotides of the invention” is intended qualitatively or quantitatively measuring or estimating the level of the polypeptide of the invention or the level of the mRNA encoding the polypeptide of the invention in a first biological sample either directly (e.g., by determining or estimating absolute protein level or mRNA level) or relatively (e.g., by comparing to the polypeptide level or mRNA level in a second biological sample). Preferably, the polypeptide level or mRNA level in the first biological sample is measured or estimated and compared to a standard polypeptide level or mRNA level, the standard being taken from a second biological sample obtained from an individual not having the related disorder or being determined by averaging levels from a population of individuals not having a related disorder. As will be appreciated in the art, once a standard polypeptide level or mRNA level is known, it can be used repeatedly as a standard for comparison.

[0381] By “biological sample” is intended any biological sample obtained from an individual, body fluid, cell line, tissue culture, or other source which contains polypeptide of the present invention or the corresponding mRNA. As indicated, biological samples include body fluids (such as semen, lymph, vaginal pool, sera, plasma, urine, synovial fluid and spinal fluid) which contain the polypeptide of the present invention, and tissue sources found to express the polypeptide of the present invention. Methods for obtaining tissue biopsies and body fluids from mammals are well known in the art. Where the biological sample is to include mRNA, a tissue biopsy is the preferred source.

[0382] The method(s) provided above may preferably be applied in a diagnostic method and/or kits in which polynucleotides and/or polypeptides of the invention are attached to a solid support. In one exemplary method, the support may be a “gene chip” or a “biological chip” as described in U.S. Pat. Nos. 5,837,832, 5,874,219, and 5,856,174. Further, such a gene chip with polynucleotides of the invention attached may be used to identify polymorphisms between the isolated polynucleotide sequences of the invention, with polynucleotides isolated from a test subject. The knowledge of such polymorphisms (i.e., their location, as well as, their existence) would be beneficial in identifying disease loci for many disorders, such as for example, in neural disorders, immune system disorders, muscular disorders, reproductive disorders, gastrointestinal disorders, pulmonary disorders, digestive disorders, cardiovascular disorders, renal disorders, proliferative disorders, and/or cancerous diseases and conditions. Such a method is described in U.S. Pat. Nos. 5,858,659 and 5,856,104. The U.S. Patents referenced supra are hereby incorporated by reference in their entirety herein.

[0383] The present invention encompasses polynucleotides of the present invention that are chemically synthesized, or reproduced as peptide nucleic acids (PNA), or according to other methods known in the art. The use of PNAs would serve as the preferred form if the polynucleotides of the invention are incorporated onto a solid support, or gene chip. For the purposes of the present invention, a peptide nucleic acid (PNA) is a polyamide type of DNA analog and the monomeric units for adenine, guanine, thymine and cytosine are available commercially (Perceptive Biosystems). Certain components of DNA, such as phosphorus, phosphorus oxides, or deoxyribose derivatives, are not present in PNAs. As disclosed by Nielsen et al., Science 254:1497 (1991); and Egholm et al., Nature 365:666 (1993), PNAs bind specifically and tightly to complementary DNA strands and are not degraded by nucleases. In fact, PNA binds more strongly to DNA than DNA itself does. This is probably because there is no electrostatic repulsion between the two strands, and also the polyamide backbone is more flexible. Because of this, PNA/DNA duplexes bind under a wider range of stringency conditions than DNA/DNA duplexes, making it easier to perform multiplex hybridization. Smaller probes can be used than with DNA due to the strong binding. In addition, it is more likely that single base mismatches can be determined with PNA/DNA hybridization because a single mismatch in a PNA/DNA 15-mer lowers the melting point (T.sub.m) by 8°-20° C., vs. 4°-16° C. for the DNA/DNA 15-mer duplex. Also, the absence of charge groups in PNA means that hybridization can be done at low ionic strengths and reduce possible interference by salt during the analysis.

[0384] The compounds of the present invention have uses which include, but are not limited to, detecting cancer in mammals. In particular the invention is useful during diagnosis of pathological cell proliferative neoplasias which include, but are not limited to: acute myelogenous leukemias including acute monocytic leukemia, acute myeloblastic leukemia, acute promyelocytic leukemia, acute myelomonocytic leukemia, acute erythroleukemia, acute megakaryocytic leukemia, and acute undifferentiated leukemia, etc.; and chronic myelogenous leukemias including chronic myelomonocytic leukemia, chronic granulocytic leukemia, etc. Preferred mammals include monkeys, apes, cats, dogs, cows, pigs, horses, rabbits and humans. Particularly preferred are humans.

[0385] The compounds of the present invention have preferred uses, which include, but are not limited to, detecting respiratory system cancer in mammals. In particular the invention is useful during diagnosis of pathological cell proliferative neoplasias which include, but are not limited to neoplasms and/or cancers of the respiratory system that include, but are not limited to nasopharyngeal cancer, cancer of the tonsils, laryngeal cancer, throat cancer, lung squamous cell carcinoma, lung adenocarcinoma, lung large cell carcinoma, lung small cell carcinoma, and cancer of the nose. Preferred mammals include monkeys, apes, cats, dogs, cows, pigs, horses, rabbits and humans. Particularly preferred are humans.

[0386] Pathological cell proliferative disorders are often associated with inappropriate activation of proto-oncogenes. (Gelmann, E. P. et al., “The Etiology of Acute Leukemia: Molecular Genetics and Viral Oncology,” in Neoplastic Diseases of the Blood, Vol 1., Wiernik, P. H. et al. eds., 161-182 (1985)). Neoplasias are now believed to result from the qualitative alteration of a normal cellular gene product, or from the quantitative modification of gene expression by insertion into the chromosome of a viral sequence, by chromosomal translocation of a gene to a more actively transcribed region, or by some other mechanism. (Gelmann et al., supra) It is likely that mutated or altered expression of specific genes is involved in the pathogenesis of some leukemias, among other tissues and cell types. (Gelmann et al., supra) Indeed, the human counterparts of the oncogenes involved in some animal neoplasias have been amplified or translocated in some cases of human leukemia and carcinoma. (Gelmann et al., supra)

[0387] For example, c-myc expression is highly amplified in the non-lymphocytic leukemia cell line HL-60. When HL-60 cells are chemically induced to stop proliferation, the level of c-myc is found to be downregulated. (International Publication Number WO 91/15580). However, it has been shown that exposure of HL-60 cells to a DNA construct that is complementary to the 5′ end of c-myc or c-myb blocks translation of the corresponding mRNAs which downregulates expression of the c-myc or c-myb proteins and causes arrest of cell proliferation and differentiation of the treated cells. (International Publication Number WO 91/15580; Wickstrom et al., Proc. Natl. Acad. Sci. 85:1028 (1988); Anfossi et al., Proc. Natl. Acad. Sci. 86:3379 (1989)). However, the skilled artisan would appreciate the present invention's usefulness is not be limited to treatment, prevention, diagnosis and/or prognosis, of proliferative disorders of cells and tissues of hematopoietic origin, in light of the numerous cells and cell types of varying origins which are known to exhibit proliferative phenotypes. In preferred embodiments, the compounds and/or methods of the invention are used to treat, prevent, diagnose, and/or prognose, proliferative disorders of respiratory system cells and tissues.

[0388] In addition to the foregoing, a polynucleotide of the present invention can be used to control gene expression through triple helix formation or through antisense DNA or RNA. Antisense techniques are discussed, for example, in Okano, J. Neurochem. 56: 560 (1991); “Oligodeoxynucleotides as Antisense Inhibitors of Gene Expression, CRC Press, Boca Raton, Fla. (1988). Triple helix formation is discussed in, for instance Lee et al., Nucleic Acids Research 6: 3073 (1979); Cooney et al., Science 241: 456 (1988); and Dervan et al., Science 251: 1360 (1991). Both methods rely on binding of the polynucleotide to a complementary DNA or RNA. For these techniques, preferred polynucleotides are usually oligonucleotides 20 to 40 bases in length and complementary to either the region of the gene involved in transcription (triple helix—see Lee et al., Nucl. Acids Res. 6:3073 (1979); Cooney et al., Science 241:456 (1988); and Dervan et al., Science 251:1360 (1991)) or to the mRNA itself (antisense—Okano, J. Neurochem. 56:560 (1991); Oligodeoxy-nucleotides as Antisense Inhibitors of Gene Expression, CRC Press, Boca Raton, Fla. (1988).) Triple helix formation optimally results in a shut-off of RNA transcription from DNA, while antisense RNA hybridization blocks translation of a mRNA molecule into polypeptide. The oligonucleotide described above can also be delivered to cells such that the antisense RNA or DNA may be expressed in vivo to inhibit production of polypeptide of the present invention antigens. Both techniques are effective in model systems, and the information disclosed herein can be used to design antisense or triple helix polynucleotides in an effort to treat disease, and in particular, for the treatment of proliferative diseases and/or conditions. Non-limiting antisense and triple helix methods encompassed by the present invention are more thoroughly described elsewhere herein (see, e.g., the section labeled “Antisense and Ribozyme (Antagonists)”).

[0389] Polynucleotides of the present invention are also useful in gene therapy. One goal of gene therapy is to insert a normal gene into an organism having a defective gene, in an effort to correct the genetic defect. The polynucleotides disclosed in the present invention offer a means of targeting such genetic defects in a highly accurate manner. Another goal is to insert a new gene that was not present in the host genome, thereby producing a new trait in the host cell. Additional non-limiting examples of gene therapy methods encompassed by the present invention are more thoroughly described elsewhere herein (see, e.g., the sections labeled “Gene Therapy Methods” and Examples 16, 17 and 18).

[0390] The polynucleotides are also useful for identifying individuals from minute biological samples. The United States military, for example, is considering the use of restriction fragment length polymorphism (RFLP) for identification of its personnel. In this technique, an individual's genomic DNA is digested with one or more restriction enzymes, and probed on a Southern blot to yield unique bands for identifying personnel. This method does not suffer from the current limitations of “Dog Tags” which can be lost, switched, or stolen, making positive identification difficult. The polynucleotides of the present invention can be used as additional DNA markers for RFLP.

[0391] The polynucleotides of the present invention can also be used as an alternative to RFLP, by determining the actual base-by-base DNA sequence of selected portions of an individual's genome. These sequences can be used to prepare PCR primers for amplifying and isolating such selected DNA, which can then be sequenced. Using this technique, individuals can be identified because each individual will have a unique set of DNA sequences. Once an unique ID database is established for an individual, positive identification of that individual, living or dead, can be made from extremely small tissue samples.

[0392] Forensic biology also benefits from using DNA-based identification techniques as disclosed herein. DNA sequences taken from very small biological samples such as tissues, e.g., hair or skin, or body fluids, e.g., blood, saliva, semen, synovial fluid, amniotic fluid, breast milk, lymph, pulmonary sputum or surfactant, urine, fecal matter, etc., can be amplified using PCR. In one prior art technique, gene sequences amplified from polymorphic loci, such as DQa class II HLA gene, are used in forensic biology to identify individuals. (Erlich, H., PCR Technology, Freeman and Co. (1992).) Once these specific polymorphic loci are amplified, they are digested with one or more restriction enzymes, yielding an identifying set of bands on a Southern blot probed with DNA corresponding to the DQa class II HLA gene. Similarly, polynucleotides of the present invention can be used as polymorphic markers for forensic purposes.

[0393] There is also a need for reagents capable of identifying the source of a particular tissue. Such need arises, for example, in forensics when presented with tissue of unknown origin. Appropriate reagents can comprise, for example, DNA probes or primers prepared from the sequences of the present invention, specific to tissues, including but not limited to, those sequences referred to in Table 1A. Panels of such reagents can identify tissue by species and/or by organ type. In a similar fashion, these reagents can be used to screen tissue cultures for contamination. Additional non-limiting examples of such uses are further described herein.

[0394] Because respiratory system antigens are found expressed in the respiratory system, the polynucleotides of the present invention are also useful as hybridization probes for differential identification of the tissue(s) or cell type(s) present in a biological sample. Similarly, polypeptides and antibodies directed to polypeptides of the present invention are useful to provide immunological probes for differential identification of the tissue(s) (e.g., immunohistochemistry assays) or cell type(s) (e.g., immunocytochemistry assays). In a specific embodiment, the polynucleotides of the present invention are also useful as hybridization probes for differential identification of respiratory system tissue(s) or cell type(s) present in a biological sample. Similarly, polypeptides and antibodies directed to polypeptides of the present invention are useful to provide immunological probes for differential identification of respiratory system tissue(s) (e.g., immunohistochemistry assays) or cell type(s) (e.g., immunocytochemistry assays). In addition, for a number of disorders of the above tissues or cells, significantly higher or lower levels of gene expression of the polynucleotides/polypeptides of the present invention may be detected in certain tissues (e.g., tissues expressing polypeptides and/or polynucleotides of the present invention, for example, normal respiratory system or diseased respiratory system tissues, and/or those tissues/cells corresponding to the library source relating to a polynucleotide sequence of the invention as disclosed in column 7 of Table 1A, and/or cancerous and/or wounded tissues) or bodily fluids (e.g., semen, lymph, vaginal pool, serum, plasma, urine, synovial fluid or spinal fluid) taken from an individual having such a disorder, relative to a “standard” gene expression level, i.e., the expression level in healthy tissue from an individual not having the disorder.

[0395] Thus, the invention provides a diagnostic method of a disorder, which involves: (a) assaying gene expression level in cells or body fluid of an individual; (b) comparing the gene expression level with a standard gene expression level, whereby an increase or decrease in the assayed gene expression level compared to the standard expression level is indicative of a disorder.

[0396] In the very least, the polynucleotides of the present invention can be used as molecular weight markers on Southern gels, as diagnostic probes for the presence of a specific mRNA in a particular cell type, as a probe to “subtract-out” known sequences in the process of discovering novel polynucleotides, for selecting and making oligomers for attachment to a “gene chip” or other support, to raise anti-DNA antibodies using DNA immunization techniques, and as an antigen to elicit an immune response.

[0397] Uses of the Polypeptides

[0398] Each of the polypeptides identified herein can be used in numerous ways. The following description should be considered exemplary and utilizes known techniques.

[0399] Polypeptides and antibodies directed to polypeptides of the present invention are useful to provide immunological probes for differential identification of the tissue(s) (e.g., immunohistochemistry assays such as, for example, ABC immunoperoxidase (Hsu et al., J. Histochem. Cytochem. 29:577-580 (1981)) or cell type(s) (e.g., immunocytochemistry assays).

[0400] Antibodies can be used to assay levels of polypeptides encoded by polynucleotides of the invention in a biological sample using classical immunohistological methods known to those of skill in the art (see, e.g., Jalkanen, et al., J. Cell. Biol. 101:976-985 (1985); Jalkanen, et al., J. Cell. Biol. 105:3087-3096 (1987)). Other antibody-based methods useful for detecting protein gene expression include immunoassays, such as the enzyme linked immunosorbent assay (ELISA) and the radioimmunoassay (RIA). Suitable antibody assay labels are known in the art and include enzyme labels, such as, glucose oxidase; radioisotopes, such as iodine (¹³¹I, ¹²⁵I, ¹²³I, ¹²¹I), carbon (¹⁴C), sulfur (³⁵S), tritium (³H), indium (^{115m}In, ^{113m}In, ¹¹²In, ¹¹¹In), and technetium (⁹⁹Tc, ^{99m}Tc), thallium (201Ti), gallium (⁶⁸Ga, ⁶⁷Ga), palladium (¹⁰³Pd), molybdenum (⁹⁹Mo), xenon (¹³³Xe), fluorine (¹⁸F), ¹⁵³Sm, ¹⁷⁷Lu, ¹⁵⁹Gd, ¹⁴⁹Pm, ¹⁴⁰La, ¹⁷⁵Yb, ^{166 Ho,} ⁹⁰Y, ⁴⁷Sc, ¹⁸⁶Re, ¹¹⁸Re, ¹⁴²Pr, ¹⁰⁵Rh, ⁹⁷Ru; luminescent labels, such as luminol; and fluorescent labels, such as fluorescein and rhodamine, and biotin.

[0401] In addition to assaying levels of polypeptide of the present invention in a biological sample, proteins can also be detected in vivo by imaging. Antibody labels or markers for in vivo imaging of protein include those detectable by X-radiography, NMR or ESR. For X-radiography, suitable labels include radioisotopes such as barium or cesium, which emit detectable radiation but are not overtly harmful to the subject. Suitable markers for NMR and ESR include those with a detectable characteristic spin, such as deuterium, which may be incorporated into the antibody by labeling of nutrients for the relevant hybridoma.

[0402] A respiratory system antigen-specific antibody or antibody fragment which has been labeled with an appropriate detectable imaging moiety, such as a radioisotope (for example, ¹³¹I, ¹¹²In, ^{99m}Tc, (¹³¹I, ¹²⁵I, ¹²³I, ¹²¹I), carbon (¹⁴C), sulfur (³⁵S), tritium (³H), indium (^{115m}In, ^{113m}In, ¹¹²In, ¹¹¹In), and technetium (⁹⁹Tc, ^{99m}Tc), thallium (²⁰¹Ti), gallium (⁶⁸Ga, ⁶⁷Ga), palladium (¹⁰³Pd), molybdenum (⁹⁹Mo), xenon (¹³³Xe), fluorine (¹⁸F, ¹⁵³Sm, ¹⁷⁷Lu, ^{159 Gd,} ¹⁴⁹Pm, ¹⁴⁰La, ¹⁷⁵Yb, ¹⁶⁶Ho, ⁹⁰Y, ⁴⁷Sc, ¹⁸⁶Re, ¹⁸⁸Re, ¹⁴²Pr, ¹⁰⁵Rh, ⁹⁷Ru), a radio-opaque substance, or a material detectable by nuclear magnetic resonance, is introduced (for example, parenterally, subcutaneously or intraperitoneally) into the mammal to be examined for respiratory system disorder. It will be understood in the art that the size of the subject and the imaging system used will determine the quantity of imaging moiety needed to produce diagnostic images. In the case of a radioisotope moiety, for a human subject, the quantity of radioactivity injected will normally range from about 5 to 20 millicuries of ^{99m}Tc. The labeled antibody or antibody fragment will then preferentially accumulate at the location of cells which express the polypeptide encoded by a polynucleotide of the invention. In vivo tumor imaging is described in S. W. Burchiel et al., “Immunopharmacokinetics of Radiolabeled Antibodies and Their Fragments” (Chapter 13 in Tumor Imaging: The Radiochemical Detection of Cancer, S. W. Burchiel and B. A. Rhodes, eds., Masson Publishing Inc. (1982)).

[0403] In one embodiment, the invention provides a method for the specific delivery of compositions of the invention to cells by administering polypeptides of the invention (e.g., polypeptides encoded by polynucleotides of the invention and/or antibodies) that are associated with heterologous polypeptides or nucleic acids. In one example, the invention provides a method for delivering a therapeutic protein into the targeted cell. In another example, the invention provides a method for delivering a single stranded nucleic acid (e.g., antisense or ribozymes) or double stranded nucleic acid (e.g., DNA that can integrate into the cell's genome or replicate episomally and that can be transcribed) into the targeted cell.

[0404] In another embodiment, the invention provides a method for the specific destruction of cells (e.g., the destruction of tumor cells) by administering polypeptides of the invention in association with toxins or cytotoxic prodrugs.

[0405] In a preferred embodiment, the invention provides a method for the specific destruction of respiratory system cells (e.g., aberrant respiratory system cells, respiratory system neoplasm) by administering polypeptides of the invention (e.g., polypeptides encoded by polynucleotides of the invention and/or antibodies) in association with toxins or cytotoxic prodrugs. In another preferred embodiment the invention provides a method for the specific destruction of tissues/cells corresponding to the library source relating to a polynucleotide sequence of the invention as disclosed in column 7 of Table 1A by administering polypeptides of the invention in association with toxins or cytotoxic prodrugs.

[0406] By “toxin” is meant one or more compounds that bind and activate endogenous cytotoxic effector systems, radioisotopes, holotoxins, modified toxins, catalytic subunits of toxins, or any molecules or enzymes not normally present in or on the surface of a cell that under defined conditions cause the cell's death. Toxins that may be used according to the methods of the invention include, but are not limited to, radioisotopes known in the art, compounds such as, for example, antibodies (or complement fixing containing portions thereof) that bind an inherent or induced endogenous cytotoxic effector system, thymidine kinase, endonuclease, RNAse, alpha toxin, ricin, abrin, Pseudomonas exotoxin A, diphtheria toxin, saporin, momordin, gelonin, pokeweed antiviral protein, alpha-sarcin and cholera toxin. “Toxin” also includes a cytostatic or cytocidal agent, a therapeutic agent or a radioactive metal ion, e.g., alpha-emitters such as, for example, ²¹³Bi, or other radioisotopes such as, for example, ¹⁰³Pd, ¹³³Xe, ¹³¹I, ¹¹¹In, ⁶⁸Ge, ⁵⁷Co, ⁶⁵Zn, ⁸⁵Sr, ³²P, ³⁵S, ⁹⁰Y, ¹⁵³Sm, ¹⁵³Gd, ¹⁶⁹Yb, ⁵¹Cr, ⁵⁴Mn, ⁷⁵Se, ¹¹³Sn, ⁹⁰Yttrium, ¹¹⁷Tin, ¹⁸⁶Rhenium, ¹⁶⁶Holmium, and ¹⁸⁸Rhenium; luminescent labels, such as luminol; and fluorescent labels, such as fluorescein and rhodamine, and biotin.

[0407] In a specific embodiment, the invention provides a method for the specific destruction of cells (e.g., the destruction of tumor cells) by administering polypeptides of the invention or antibodies of the invention in association with the radioisotope ⁹⁰Y. In another specific embodiment, the invention provides a method for the specific destruction of cells (e.g., the destruction of tumor cells) by administering polypeptides of the invention or antibodies of the invention in association with the radioisotope ¹¹¹In. In a further specific embodiment, the invention provides a method for the specific destruction of cells (e.g., the destruction of tumor cells) by administering polypeptides of the invention or antibodies of the invention in association with the radioisotope ¹³¹I.

[0408] Techniques known in the art may be applied to label polypeptides of the invention (including antibodies). Such techniques include, but are not limited to, the use of bifunctional conjugating agents (see e.g., U.S. Pat. Nos. 5,756,065; 5,714,631; 5,696,239; 5,652,361; 5,505,931; 5,489,425; 5,435,990; 5,428,139; 5,342,604; 5,274,119; 4,994,560; and 5,808,003; the contents of each of which are hereby incorporated by reference in its entirety).

[0409] Thus, the invention provides a diagnostic method of a disorder, which involves (a) assaying the expression level of a polypeptide of the present invention in cells or body fluid of an individual; and (b) comparing the assayed polypeptide expression level with a standard polypeptide expression level, whereby an increase or decrease in the assayed polypeptide expression level compared to the standard expression level is indicative of a disorder. With respect to cancer, the presence of a relatively high amount of transcript in biopsied tissue from an individual may indicate a predisposition for the development of the disease, or may provide a means for detecting the disease prior to the appearance of actual clinical symptoms. A more definitive diagnosis of this type may allow health professionals to employ preventative measures or aggressive treatment earlier thereby preventing the development or further progression of the cancer.

[0410] Moreover, polypeptides of the present invention can be used to treat or prevent diseases or conditions of the respiratory system such as, for example, throat disorders (e.g., vocal cord paralysis, tonsillitis, and larynigitis), lung disorders (e.g., pneumonia, allegeric disorders (e.g., asthma and eosionphilic pheumonia), pleurisy, cystic fibrosis, emphysema, histiocytosis X, and sarcoidosis), nose disorders (rhinitis and sinusitis), neoplasms and/or cancers of respiratory tissues (e.g., throat cancer, lung cancer, and cancer of the nose), and/or those disorders as described under “Respiratory Disorders”. In preferred embodiments, polynucleotides expressed in a particular tissue type (see, e.g., Table 1A, column 7) are used to diagnose, detect, prevent, treat and/or prognose disorders associated with the tissue type. For example, patients can be administered a polypeptide of the present invention in an effort to replace absent or decreased levels of the polypeptide (e.g., insulin), to supplement absent or decreased levels of a different polypeptide (e.g., hemoglobin S for hemoglobin B, SOD, catalase, DNA repair proteins), to inhibit the activity of a polypeptide (e.g., an oncogene or tumor supressor), to activate the activity of a polypeptide (e.g., by binding to a receptor), to reduce the activity of a membrane bound receptor by competing with it for free ligand (e.g., soluble TNF receptors used in reducing inflammation), or to bring about a desired response (e.g., blood vessel growth inhibition, enhancement of the immune response to proliferative cells or tissues).

[0411] Similarly, antibodies directed to a polypeptide of the present invention can also be used to treat disease (as described supra, and elsewhere herein). For example, administration of an antibody directed to a polypeptide of the present invention can bind, and/or neutralize the polypeptide, and/or reduce overproduction of the polypeptide. Similarly, administration of an antibody can activate the polypeptide, such as by binding to a polypeptide bound to a membrane (receptor).

[0412] At the very least, the polypeptides of the present invention can be used as molecular weight markers on SDS-PAGE gels or on molecular sieve gel filtration columns using methods well known to those of skill in the art. Polypeptides can also be used to raise antibodies, which in turn are used to measure protein expression from a recombinant cell, as a way of assessing transformation of the host cell. Moreover, the polypeptides of the present invention can be used to test the biological activities described herein.

[0413] Diagnostic Asssays

[0414] The compounds of the present invention are useful for diagnosis, treatment, prevention and/or prognosis of various respiratory system related disorders in mammals, preferably humans. Such disorders include, but are not limited to, throat disorders (e.g., vocal cord paralysis, tonsillitis, and larynigitis), lung disorders (e.g., pneumonia, allegeric disorders (e.g., asthma and eosionphilic pheumonia), pleurisy, cystic fibrosis, emphysema, histiocytosis X, and sarcoidosis), nose disorders (rhinitis and sinusitis), neoplasms and/or cancers of respiratory tissues (e.g., throat cancer, lung cancer, and cancer of the nose), and/or those disorders as described under “Respiratory Disorders”. In preferred embodiments, polynucleotides expressed in a particular tissue type (see, e.g., Table 1A, column 7) are used to diagnose, detect, prevent, treat and/or prognose disorders associated with the tissue type.

[0415] Respiratory system antigens are expressed in the respiratory system, with an increased expression level in respiratory system tissues. For a number of respiratory system-related disorders, substantially altered (increased or decreased) levels of respiratory system antigen gene expression can be detected in respiratory system tissue or other cells or bodily fluids (e.g., sera, plasma, urine, semen, synovial fluid or spinal fluid) taken from an individual having such a disorder, relative to a “standard” respiratory system antigen gene expression level, that is, the respiratory system antigen expression level in respiratory system tissues or bodily fluids from an individual not having the respiratory system disorder. Thus, the invention provides a diagnostic method useful during diagnosis of a respiratory system disorder, which involves measuring the expression level of the gene encoding the respiratory system associated polypeptide in respiratory system tissue or other cells or body fluid from an individual and comparing the measured gene expression level with a standard respiratory system antigens gene expression level, whereby an increase or decrease in the gene expression level(s) compared to the standard is indicative of an respiratory system disorder.

[0416] In specific embodiments, the invention provides a diagnostic method useful during diagnosis of a disorder of a normal or diseased tissue/cell source corresponding to column 7 of Table 1A, which involves measuring the expression level of the coding sequence of a polynucleotide sequence associated with this tissue/cell source as disclosed in Table 1A in the tissue/cell source or other cells or body fluid from an individual and comparing the expression level of the coding sequence with a standard expression level of the coding sequence of a polynucleotide sequence, whereby an increase or decrease in the gene expression level(s) compared to the standard is indicative of a disorder of a normal or diseased tissue/cell source corresponding to column 7 of Table 1A.

[0417] In particular, it is believed that certain tissues in mammals with cancer of cells or tissue of the respiratory system express significantly enhanced or reduced levels of normal or altered respiratory system antigen expression and mRNA encoding the respiratory system associated polypeptide when compared to a corresponding “standard” level. Further, it is believed that enhanced or depressed levels of the respiratory system associated polypeptide can be detected in certain body fluids (e.g., sera, plasma, urine, and spinal fluid) or cells or tissue from mammals with such a cancer when compared to sera from mammals of the same species not having the cancer.

[0418] For example, as disclosed herein, respiratory system associated polypeptides of the invention are expressed in respiratory system. Accordingly, polynucleotides of the invention (e.g., polynucleotide sequences complementary to all or a portion of a respiratory system antigen mRNA nucleotide sequence of SEQ ID NO:X, nucleotide sequence encoding SEQ ID NO:Y, nucleotide sequence encoding a polypeptide encoded by SEQ ID NO:X and/or a nucleotide sequence delineated by columns 8 and 9 of Table 2) and antibodies (and antibody fragments) directed against the polypeptides of the invention may be used to quantitate or qualitate concentrations of cells of the respiratory system expressing respiratory system antigens, preferrably on their cell surfaces. These polynucleotides and antibodies additionally have diagnostic applications in detecting abnormalities in the level of respiratory system antigens gene expression, or abnormalities in the structure and/or temporal, tissue, cellular, or subcellular location of respiratory system antigens. These diagnostic assays may be performed in vivo or in vitro, such as, for example, on blood samples, biopsy tissue or autopsy tissue. In specific embodiments, polynucleotides and antibodies of the invention are used to quantitate or qualitate tissues/cells corresponding to the library source disclosed in column 7 of Table 1A expressing the corresponding respiratory system sequence disclosed in the same row of Table 1A, preferrably on their cell surface.

[0419] Thus, the invention provides a diagnostic method useful during diagnosis of a respiratory system disorder, including cancers, which involves measuring the expression level of the gene encoding the respiratory system antigen polypeptide in respiratory system tissue or other cells or body fluid from an individual and comparing the measured gene expression level with a standard respiratory system antigen gene expression level, whereby an increase or decrease in the gene expression level compared to the standard is indicative of a respiratory system disorder. In specific embodiments, polynucleotides and antibodies of the invention are used to quantitate or qualitate tissues/cells corresponding to the library source disclosed in column 7 of Table 1A expressing the corresponding respiratory systemrespiratory system sequence disclosed in the same row of Table 1A, preferrably on their cell surface.

[0420] Where a diagnosis of a disorder in the respiratory system, including diagnosis of a tumor, has already been made according to conventional methods, the present invention is useful as a prognostic indicator, whereby patients exhibiting enhanced or depressed respiratory system antigen gene expression will experience a worse clinical outcome relative to patients expressing the gene at a level nearer the standard level.

[0421] By “assaying the expression level of the gene encoding the respiratory system associated polypeptide” is intended qualitatively or quantitatively measuring or estimating the level of the respiratory system antigen polypeptide or the level of the mRNA encoding the respiratory system antigen polypeptide in a first biological sample either directly (e.g., by determining or estimating absolute protein level or mRNA level) or relatively (e.g., by comparing to the respiratory system associated polypeptide level or mRNA level in a second biological sample). Preferably, the respiratory system antigen polypeptide expression level or mRNA level in the first biological sample is measured or estimated and compared to a standard respiratory system antigen polypeptide level or mRNA level, the standard being taken from a second biological sample obtained from an individual not having the disorder or being determined by averaging levels from a population of individuals not having a disorder of the respiratory system. As will be appreciated in the art, once a standard respiratory system antigen polypeptide level or mRNA level is known, it can be used repeatedly as a standard for comparison.

[0422] By “biological sample” is intended any biological sample obtained from an individual, cell line, tissue culture, or other source containing respiratory system antigen polypeptides (including portions thereof) or mRNA. As indicated, biological samples include body fluids (such as sera, plasma, urine, synovial fluid and spinal fluid) which contain cells expressing respiratory system antigen polypeptides, respiratory system tissue, and other tissue sources found to express the full length or fragments thereof of a respiratory system antigen. Methods for obtaining tissue biopsies and body fluids from mammals are well known in the art. Where the biological sample is to include mRNA, a tissue biopsy is the preferred source.

[0423] Total cellular RNA can be isolated from a biological sample using any suitable technique such as the single-step guanidinium-thiocyanate-phenol-chloroform method described in Chomczynski and Sacchi, Anal. Biochem. 162:156-159 (1987). Levels of mRNA encoding the respiratory system antigen polypeptides are then assayed using any appropriate method. These include Northern blot analysis, S1 nuclease mapping, the polymerase chain reaction (PCR), reverse transcription in combination with the polymerase chain reaction (RT-PCR), and reverse transcription in combination with the ligase chain reaction (RT-LCR).

[0424] The present invention also relates to diagnostic assays such as quantitative and diagnostic assays for detecting levels of respiratory system antigen polypeptides, in a biological sample (e.g., cells and tissues), including determination of normal and abnormal levels of polypeptides. Thus, for instance, a diagnostic assay in accordance with the invention for detecting over-expression of respiratory system antigens compared to normal control tissue samples may be used to detect the presence of tumors. Assay techniques that can be used to determine levels of a polypeptide, such as a respiratory system antigen polypeptide of the present invention in a sample derived from a host are well-known to those of skill in the art. Such assay methods include radioimmunoassays, competitive-binding assays, Western Blot analysis and ELISA assays. Assaying respiratory system antigen polypeptide levels in a biological sample can occur using any art-known method.

[0425] Assaying respiratory system antigen polypeptide levels in a biological sample can occur using antibody-based techniques. For example, respiratory system antigen polypeptide expression in tissues can be studied with classical immunohistological methods (Jalkanen et al., J. Cell. Biol. 101:976-985 (1985); Jalkanen, M., et al., J. Cell. Biol. 105:3087-3096 (1987)). Other antibody-based methods useful for detecting respiratory system antigen polypeptide gene expression include immunoassays, such as the enzyme linked immunosorbent assay (ELISA) and the radioimmunoassay (RIA). Suitable antibody assay labels are known in the art and include enzyme labels, such as, glucose oxidase, and radioisotopes, such as iodine (¹²⁵I, ¹²¹I), carbon (¹⁴C), sulfur (³⁵S), tritium (³H), indium (¹¹²In), and technetium (^{99m}Tc), and fluorescent labels, such as fluorescein and rhodamine, and biotin.

[0426] The tissue or cell type to be analyzed will generally include those which are known, or suspected, to express the respiratory system antigen gene (such as, for example, cells of the respiratory system or cancer of respiratory system tissues). The protein isolation methods employed herein may, for example, be such as those described in Harlow and Lane (Harlow, E. and Lane, D., 1988, “Antibodies: A Laboratory Manual”, Cold Spring Harbor Laboratory Press, Cold Spring Harbor, N.Y.), which is incorporated herein by reference in its entirety. The isolated cells can be derived from cell culture or from a patient. The analysis of cells taken from culture may be a necessary step in the assessment of cells that could be used as part of a cell-based gene therapy technique or, alternatively, to test the effect of compounds on the expression of the respiratory system antigen gene.

[0427] For example, antibodies, or fragments of antibodies, such as those described herein, may be used to quantitatively or qualitatively detect the presence of respiratory system antigen gene products or conserved variants or peptide fragments thereof. This can be accomplished, for example, by immunofluorescence techniques employing a fluorescently labeled antibody coupled with light microscopic, flow cytometric, or fluorimetric detection.

[0428] In a preferred embodiment, antibodies, or fragments of antibodies directed to any one or all of the predicted epitope domains of the respiratory system antigen polypeptides (Shown in Table 1A, column 6) may be used to quantitatively or qualitatively detect the presence of respiratory system antigen gene products or conserved variants or peptide fragments thereof. This can be accomplished, for example, by immunofluorescence techniques employing a fluorescently labeled antibody coupled with light microscopic, flow cytometric, or fluorimetric detection.

[0429] In an additional preferred embodiment, antibodies, or fragments of antibodies directed to a conformational epitope of a respiratory system antigen may be used to quantitatively or qualitatively detect the presence of respiratory system antigen gene products or conserved variants or peptide fragments thereof. This can be accomplished, for example, by immunofluorescence techniques employing a fluorescently labeled antibody coupled with light microscopic, flow cytometric, or fluorimetric detection.

[0430] The antibodies (or fragments thereof), and/or respiratory system antigen polypeptides of the present invention may, additionally, be employed histologically, as in immunofluorescence, immunoelectron microscopy or non-immunological assays, for in situ detection of respiratory system antigen gene products or conserved variants or peptide fragments thereof. In situ detection may be accomplished by removing a histological specimen from a patient, and applying thereto a labeled antibody or respiratory system antigen polypeptide of the present invention. The antibody (or fragment thereof) or respiratory system antigen polypeptide is preferably applied by overlaying the labeled antibody (or fragment) onto a biological sample. Through the use of such a procedure, it is possible to determine not only the presence of the respiratory system antigen gene product, or conserved variants or peptide fragments, or respiratory system antigen polypeptide binding, but also its distribution in the examined tissue. Using the present invention, those of ordinary skill will readily perceive that any of a wide variety of histological methods (such as staining procedures) can be modified in order to achieve such in situ detection.

[0431] Immunoassays and non-immunoassays for respiratory system antigen gene products or conserved variants or peptide fragments thereof will typically comprise incubating a sample, such as a biological fluid, a tissue extract, freshly harvested cells, or lysates of cells which have been incubated in cell culture, in the presence of a detectably labeled antibody capable of binding respiratory system antigen gene products or conserved variants or peptide fragments thereof, and detecting the bound antibody by any of a number of techniques well-known in the art.

[0432] The biological sample may be brought in contact with and immobilized onto a solid phase support or carrier such as nitrocellulose, or other solid support which is capable of immobilizing cells, cell particles or soluble proteins. The support may then be washed with suitable buffers followed by treatment with the detectably labeled anti-respiratory system antigen antibody or detectable respiratory system antigen polypeptide. The solid phase support may then be washed with the buffer a second time to remove unbound antibody or polypeptide. Optionally the antibody is subsequently labeled. The amount of bound label on solid support may then be detected by conventional means.

[0433] By “solid phase support or carrier” is intended any support capable of binding an antigen or an antibody. Well-known supports or carriers include glass, polystyrene, polypropylene, polyethylene, dextran, nylon, amylases, natural and modified celluloses, polyacrylamides, gabbros, and magnetite. The nature of the carrier can be either soluble to some extent or insoluble for the purposes of the present invention. The support material may have virtually any possible structural configuration so long as the coupled molecule is capable of binding to an antigen or antibody. Thus, the support configuration may be spherical, as in a bead, or cylindrical, as in the inside surface of a test tube, or the external surface of a rod. Alternatively, the surface may be flat such as a sheet, test strip, etc. Preferred supports include polystyrene beads. Those skilled in the art will know many other suitable carriers for binding antibody or antigen, or will be able to ascertain the same by use of routine experimentation.

[0434] The binding activity of a given lot of anti-respiratory system antigen antibody or respiratory system antigen polypeptide may be determined according to well known methods. Those skilled in the art will be able to determine operative and optimal assay conditions for each determination by employing routine experimentation.

[0435] In addition to assaying respiratory system antigen polypeptide levels or polynucleotide levels in a biological sample obtained from an individual, respiratory system antigen polypeptide or polynucleotide can also be detected in vivo by imaging. For example, in one embodiment of the invention, respiratory system antigen polypeptide and/or anti-respiratory system antigen antibodies are used to image respiratory system diseased cells, such as neoplasms. In another embodiment, respiratory system antigen polynucleotides of the invention (e.g., polynucleotides complementary to all or a portion of respiratory system antigen mRNA) and/or anti-respiratory system antigen antibodies (e.g., antibodies directed to any one or a combination of the epitopes of respiratory system antigens, antibodies directed to a conformational epitope of respiratory system antigens, antibodies directed to the full length polypeptide expressed on the cell surface of a mammalian cell) are used to image diseased or neoplastic cells of the respiratory system.

[0436] Antibody labels or markers for in vivo imaging of respiratory system antigen polypeptides include those detectable by X-radiography, NMR, MRI, CAT-scans or ESR. For X-radiography, suitable labels include radioisotopes such as barium or cesium, which emit detectable radiation but are not overtly harmful to the subject. Suitable markers for NMR and ESR include those with a detectable characteristic spin, such as deuterium, which may be incorporated into the antibody by labeling of nutrients for the relevant hybridoma. Where in vivo imaging is used to detect enhanced levels of respiratory system antigen polypeptides for diagnosis in humans, it may be preferable to use human antibodies or “humanized” chimeric monoclonal antibodies. Such antibodies can be produced using techniques described herein or otherwise known in the art. For example methods for producing chimeric antibodies are known in the art. See, for review, Morrison, Science 229:1202 (1985); Oi et al., BioTechniques 4:214 (1986); Cabilly et al., U.S. Pat. No. 4,816,567; Taniguchi et al., EP 171496; Morrison et al., EP 173494; Neuberger et al., WO 8601533; Robinson et al., WO 8702671; Boulianne et al., Nature 312:643 (1984); Neuberger et al., Nature 314:268 (1985).

[0437] Additionally, any respiratory system antigen polypeptides whose presence can be detected, can be administered. For example, respiratory system antigen polypeptides labeled with a radio-opaque or other appropriate compound can be administered and visualized in vivo, as discussed, above for labeled antibodies. Further such respiratory system antigen polypeptides can be utilized for in vitro diagnostic procedures.

[0438] A respiratory system antigen polypeptide-specific antibody or antibody fragment which has been labeled with an appropriate detectable imaging moiety, such as a radioisotope (for example, ¹³¹I, ¹¹²In, ^{99m}Tc), a radio-opaque substance, or a material detectable by nuclear magnetic resonance, is introduced (for example, parenterally, subcutaneously or intraperitoneally) into the mammal to be examined for a respiratory system disorder. It will be understood in the art that the size of the subject and the imaging system used will determine the quantity of imaging moiety needed to produce diagnostic images. In the case of a radioisotope moiety, for a human subject, the quantity of radioactivity injected will normally range from about 5 to 20 millicuries of ^{99m}Tc. The labeled antibody or antibody fragment will then preferentially accumulate at the location of cells which contain respiratory system antigen protein. In vivo tumor imaging is described in S. W. Burchiel et al., “Immunopharmacokinetics of Radiolabeled Antibodies and Their Fragments” (Chapter 13 n Tumor Imaging: The Radiochemical Detection of Cancer, S. W. Burchiel and B. A. Rhodes, eds., Masson Publishing Inc. (1982)).

[0439] With respect to antibodies, one of the ways in which the anti-respiratory system antigen antibody can be detectably labeled is by linking the same to an enzyme and using the linked product in an enzyme immunoassay (EIA) (Voller, A., “The Enzyme Linked Immunosorbent Assay (ELISA)”, 1978, Diagnostic Horizons 2:1-7, Microbiological Associates Quarterly Publication, Walkersville, Md.); Voller et al., J. Clin. Pathol. 31:507-520 (1978); Butler, J. E., Meth. Enzymol. 73:482-523 (1981); Maggio, E. (ed.), 1980, Enzyme Immunoassay, CRC Press, Boca Raton, Fla.,; Ishikawa, E. et al., (eds.), 1981, Enzyme Immunoassay, Kgaku Shoin, Tokyo). The enzyme which is bound to the antibody will react with an appropriate substrate, preferably a chromogenic substrate, in such a manner as to produce a chemical moiety which can be detected, for example, by spectrophotometric, fluorimetric or by visual means. Enzymes which can be used to detectably label the antibody include, but are not limited to, malate dehydrogenase, staphylococcal nuclease, delta-5-steroid isomerase, yeast alcohol dehydrogenase, alpha-glycerophosphate, dehydrogenase, triose phosphate isomerase, horseradish peroxidase, alkaline phosphatase, asparaginase, glucose oxidase, beta-galactosidase, ribonuclease, urease, catalase, glucose-6-phosphate dehydrogenase, glucoamylase and acetylcholinesterase. Additionally, the detection can be accomplished by colorimetric methods which employ a chromogenic substrate for the enzyme. Detection may also be accomplished by visual comparison of the extent of enzymatic reaction of a substrate in comparison with similarly prepared standards.

[0440] Detection may also be accomplished using any of a variety of other immunoassays. For example, by radioactively labeling the antibodies or antibody fragments, it is possible to detect respiratory system antigens through the use of a radioimmunoassay (RIA) (see, for example, Weintraub, B., Principles of Radioimmunoassays, Seventh Training Course on Radioligand Assay Techniques, The Endocrine Society, March, 1986, which is incorporated by reference herein). The radioactive isotope can be detected by means including, but not limited to, a gamma counter, a scintillation counter, or autoradiography.

[0441] It is also possible to label the antibody with a fluorescent compound. When the fluorescently labeled antibody is exposed to light of the proper wave length, its presence can then be detected due to fluorescence. Among the most commonly used fluorescent labeling compounds are fluorescein isothiocyanate, rhodamine, phycoerythrin, phycocyanin, allophycocyanin, ophthaldehyde and fluorescamine.

[0442] The antibody can also be detectably labeled using fluorescence emitting metals such as ¹⁵²Eu, or others of the lanthanide series. These metals can be attached to the antibody using such metal chelating groups as diethylenetriaminepentacetic acid (DTPA) or ethylenediaminetetraacetic acid (EDTA).

[0443] The antibody also can be detectably labeled by coupling it to a chemiluminescent compound. The presence of the chemiluminescent-tagged antibody is then determined by detecting the presence of luminescence that arises during the course of a chemical reaction. Examples of particularly useful chemiluminescent labeling compounds are luminol, isoluminol, theromatic acridinium ester, imidazole, acridinium salt and oxalate ester.

[0444] Likewise, a bioluminescent compound may be used to label the antibody of the present invention. Bioluminescence is a type of chemiluminescence found in biological systems in, which a catalytic protein increases the efficiency of the chemiluminescent reaction. The presence of a bioluminescent protein is determined by detecting the presence of luminescence. Important bioluminescent compounds for purposes of labeling are luciferin, luciferase and aequorin.

[0445] Methods for Detecting Respiratory System Diseases Including Cancer

[0446] In general, a respiratory system disease or cancer may be detected in a patient based on the presence of one or more respiratory system antigen proteins of the invention and/or polynucleotides encoding such proteins in a biological sample (for example, blood, sera, urine, and/or tumor biopsies) obtained from the patient. In other words, such proteins and/or polynucleotides may be used as markers to indicate the presence or absence of a respiratory system disease or disorder, including cancer. Cancers that may be diagnosed, and/or prognosed using the compositions of the invention include but are not limited to, cancer of respiratory system tissues. In addition, such proteins and/or polynucleotides may be useful for the detection of other diseases and cancers, including cancers of tissues/cells corresponding to the library source disclosed in column 7 of Table 1A expressing the corresponding respiratory system sequence disclosed in the same row of Table 1A. The binding agents provided herein generally permit detection of the level of antigen that binds to the agent in the biological sample. Polynucleotide primers and probes may be used to detect the level of mRNA encoding respiratory system antigen polypeptides, which is also indicative of the presence or absence of a respiratory system disease or disorder, including cancer. In general, respiratory system antigen polypeptides should be present at a level that is at least three fold higher in diseased tissue than in normal tissue.

[0447] There are a variety of assay formats known to those of ordinary skill in the art for using a binding agent to detect polypeptide markers in a sample. See, e.g., Harlow and Lane, supra. In general, the presence or absence of a respiratory system disease in a patient may be determined by (a) contacting a biological sample obtained from a patient with a binding agent; (b) detecting in the sample a level of polypeptide that binds to the binding agent; and (c) comparing the level of polypeptide with a predetermined cut-off value.

[0448] In a preferred embodiment, the assay involves the use of binding agent immobilized on a solid support to bind to and remove the respiratory system antigen polypeptide of the invention from the remainder of the sample. The bound polypeptide may then be detected using a detection reagent that contains a reporter group and specifically binds to the binding agent/polypeptide complex. Such detection reagents may comprise, for example, a binding agent that specifically binds to the polypeptide or an antibody or other agent that specifically binds to the binding agent, such as an anti-immunoglobulin, protein G, protein A or a lectin. Alternatively, a competitive assay may be utilized, in which a polypeptide is labeled with a reporter group and allowed to bind to the immobilized binding agent after incubation of the binding agent with the sample. The extent to which components of the sample inhibit the binding of the labeled polypeptide to the binding agent is indicative of the reactivity of the sample with the immobilized binding agent. Suitable polypeptides for use within such assays include respiratory system antigen polypeptides and portions thereof, or antibodies, to which the binding agent binds, as described above.

[0449] The solid support may be any material known to those of skill in the art to which respiratory system antigen polypeptides of the invention may be attached. For example, the solid support may be a test well in a microtiter plate or a nitrocellulose or other suitable membrane. Alternatively, the support may be a bead or disc, such as glass fiberglass, latex or a plastic material such as polystyrene or polyvinylchloride. The support may also be a magnetic particle or a fiber optic sensor, such as those disclosed, for example, in U.S. Pat. No. 5,359,681. The binding agent may be immobilized on the solid support using a variety of techniques known to those of skill in the art, which are amply described in the patent and scientific literature. In the context of the present invention, the term “immobilization” refers to both noncovalent association, such as adsorption, and covalent attachment (which may be a direct linkage between the agent and functional groups on the support or may be a linkage by way of a cross-linking agent). Immobilization by adsorption to a well in a microtiter plate or to a membrane is preferred. In such cases, adsorption may be achieved by contacting the binding agent, in a suitable buffer, with the solid support for the suitable amount of time. The contact time varies with temperature, but is typically between about 1 hour and about 1 day. In general, contacting a well of plastic microtiter plate (such as polystyrene or polyvinylchloride) with an amount of binding agent ranging from about 10 ng to about 10 ug, and preferably about 100 ng to about 1 ug, is sufficient to immobilize an adequate amount of binding agent.

[0450] Covalent attachment of binding agent to a solid support may generally be achieved by first reacting the support with a bifunctional reagent that will react with both the support and a functional group, such as a hydroxyl or amino group, on the binding agent. For example, the binding agent may be covalently attached to supports having an appropriate polymer coating using benzoquinone or by condensation of an aldehyde group on the support with an amine and an active hydrogen on the binding partner (see, e.g., Pierce Immunotechnology Catalog and Handbook, 1991, at A12-A13).

[0451] Gene Therapy Methods

[0452] Also encompassed by the present invention are gene therapy methods for treating or preventing disorders, diseases and conditions. The gene therapy methods relate to the introduction of nucleic acid (DNA, RNA and antisense DNA or RNA) sequences into an animal to achieve expression of a respiratory system antigen of the present invention. This method requires a polynucleotide, which codes for a polypeptide of the present invention operatively linked to a promoter and any other genetic elements necessary for the expression of the polypeptide by the target tissue. Such gene therapy and delivery techniques are known in the art, see, for example, WO90/11092, which is herein incorporated by reference.

[0453] Thus, for example, cells from a patient may be engineered with a polynucleotide (DNA or RNA) comprising a promoter operably linked to a polynucleotide of the present invention ex vivo, with the engineered cells then being provided to a patient to be treated with the polypeptide of the present invention. Such methods are well-known in the art. For example, see Belldegrun, A., et al., J. Natl. Cancer Inst. 85: 207-216 (1993); Ferrantini, M. et al., Cancer Research 53: 1107-1112 (1993); Ferrantini, M. et al., J. Immunology 153: 4604-4615 (1994); Kaido, T., et al., Int. J. Cancer 60: 221-229 (1995); Ogura, H., et al., Cancer Research 50: 5102-5106 (1990); Santodonato, L., et al., Human Gene Therapy 7:1-10 (1996); Santodonato, L., et al., Gene Therapy 4:1246-1255 (1997); and Zhang, J.-F. et al., Cancer Gene Therapy 3: 31-38 (1996)), which are herein incorporated by reference. In one embodiment, the cells, which are engineered are arterial cells. The arterial cells may be reintroduced into the patient through direct injection to the artery, the tissues surrounding the artery, or through catheter injection.

[0454] As discussed in more detail below, the polynucleotide constructs can be delivered by any method that delivers injectable materials to the cells of an animal, such as, injection into the interstitial space of tissues (heart, muscle, skin, lung, liver, and the like). The polynucleotide constructs may be delivered in a pharmaceutically acceptable liquid or aqueous carrier.

[0455] In one embodiment, the polynucleotide of the present invention is delivered as a naked polynucleotide. The term “naked” polynucleotide, DNA or RNA refers to sequences that are free from any delivery vehicle that acts to assist, promote or facilitate entry into the cell, including viral sequences, viral particles, liposome formulations, lipofectin or precipitating agents and the like. However, the polynucleotide of the present invention can also be delivered in liposome formulations and lipofectin formulations and the like can be prepared by methods well known to those skilled in the art. Such methods are described, for example, in U.S. Pat. Nos. 5,593,972, 5,589,466, and 5,580,859, which are herein incorporated by reference.

[0456] The polynucleotide vector constructs used in the gene therapy method are preferably constructs that will not integrate into the host genome nor will they contain sequences that allow for replication. Appropriate vectors include pWLNEO, pSV2CAT, pOG44, pXT1 and pSG available from Stratagene; pSVK3, pBPV, pMSG and pSVL available from Pharmacia; and pEF1/V5, pcDNA3.1, and pRc/CMV2 available from Invitrogen. Other suitable vectors will be readily apparent to the skilled artisan.

[0457] Any strong promoter known to those skilled in the art can be used for driving the expression of the polynucleotide sequence. Suitable promoters include adenoviral promoters, such as the adenoviral major late promoter; or heterologous promoters, such as the cytomegalovirus (CMV) promoter; the respiratory syncytial virus (RSV) promoter; inducible promoters, such as the MMT promoter, the metallothionein promoter; heat shock promoters; the albumin promoter; the ApoAI promoter; human globin promoters; viral thymidine kinase promoters, such as the Herpes Simplex thymidine kinase promoter; retroviral LTRs; the b-actin promoter; and human growth hormone promoters. The promoter also may be the native promoter for the polynucleotide of the present invention.

[0458] Unlike other gene therapy techniques, one major advantage of introducing naked nucleic acid sequences into target cells is the transitory nature of the polynucleotide synthesis in the cells. Studies have shown that non-replicating DNA sequences can be introduced into cells to provide production of the desired polypeptide for periods of up to six months.

[0459] The polynucleotide construct can be delivered to the interstitial space of tissues within the an animal, including of muscle, skin, brain, lung, liver, spleen, bone marrow, thymus, heart, lymph, blood, bone, cartilage, pancreas, kidney, gall bladder, stomach, intestine, testis, ovary, uterus, rectum, nervous system, eye, gland, and connective tissue. Interstitial space of the tissues comprises the intercellular, fluid, mucopolysaccharide matrix among the reticular fibers of organ tissues, elastic fibers in the walls of vessels or chambers, collagen fibers of fibrous tissues, or that same matrix within connective tissue ensheathing muscle cells or in the lacunae of bone. It is similarly the space occupied by the plasma of the circulation and the lymph fluid of the lymphatic channels. Delivery to the interstitial space of muscle tissue is preferred for the reasons discussed below. They may be conveniently delivered by injection into the tissues comprising these cells. They are preferably delivered to and expressed in persistent, non-dividing cells which are differentiated, although delivery and expression may be achieved in non-differentiated or less completely differentiated cells, such as, for example, stem cells of blood or skin fibroblasts. In vivo muscle cells are particularly competent in their ability to take up and express polynucleotides.

[0460] For the naked nucleic acid sequence injection, an effective dosage amount of DNA or RNA will be in the range of from about 0.05 mg/kg body weight to about 50 mg/kg body weight. Preferably the dosage will be from about 0.005 mg/kg to about 20 mg/kg and more preferably from about 0.05 mg/kg to about 5 mg/kg. Of course, as the artisan of ordinary skill will appreciate, this dosage will vary according to the tissue site of injection. The appropriate and effective dosage of nucleic acid sequence can readily be determined by those of ordinary skill in the art and may depend on the condition being treated and the route of administration.

[0461] The preferred route of administration is by the parenteral route of injection into the interstitial space of tissues. However, other parenteral routes may also be used, such as, inhalation of an aerosol formulation particularly for delivery to lungs or bronchial tissues, throat or mucous membranes of the nose. In addition, naked DNA constructs can be delivered to arteries during angioplasty by the catheter used in the procedure.

[0462] The naked polynucleotides are delivered by any method known in the art, including, but not limited to, direct needle injection at the delivery site, intravenous hinjection, topical administration, catheter infusion, and so-called “gene guns”. These delivery methods are known in the art.

[0463] The constructs may also be delivered with delivery vehicles such as viral sequences, viral particles, liposome formulations, lipofectin, precipitating agents, etc. Such methods of delivery are known in the art.

[0464] In certain embodiments, the polynucleotide constructs are complexed in a liposome preparation. Liposomal preparations for use in the instant invention include cationic (positively charged), anionic (negatively charged) and neutral preparations. However, cationic liposomes are particularly preferred because a tight charge complex can be formed between the cationic liposome and the polyanionic nucleic acid. Cationic liposomes have been shown to mediate intracellular delivery of plasmid DNA (Felgner et al., Proc. Natl. Acad. Sci. USA (1987) 84:7413-7416, which is herein incorporated by reference); mRNA (Malone et al., Proc. Natl. Acad. Sci. USA (1989) 86:6077-6081, which is herein incorporated by reference); and purified transcription factors (Debs et al., J. Biol. Chem. (1990) 265:10189-10192, which is herein incorporated by reference), in functional form.

[0465] Cationic liposomes are readily available. For example, N[1-2,3-dioleyloxy)propyl]-N,N,N-triethylammonium (DOTMA) liposomes are particularly useful and are available under the trademark Lipofectin, from GIBCO BRL, Grand Island, N.Y., (see, also, Felgner et al., Proc. Natl Acad. Sci. USA (1987) 84:7413-7416, which is herein incorporated by reference). Other commercially available liposomes include transfectace (DDAB/DOPE) and DOTAP/DOPE (Boehringer).

[0466] Other cationic liposomes can be prepared from readily available materials using techniques well known in the art. See, e.g. PCT Publication No. WO 90/11092 (which is herein incorporated by reference) for a description of the synthesis of DOTAP (1,2-bis(oleoyloxy)-3-(trimethylammonio)propane)liposomes. Preparation of DOTMA liposomes is explained in the literature, see, e.g., P. Felgner et al., Proc. Natl. Acad. Sci. USA 84:7413-7417, which is herein incorporated by reference. Similar methods can be used to prepare liposomes from other cationic lipid materials.

[0467] Similarly, anionic and neutral liposomes are readily available, such as from Avanti Polar Lipids (Birmingham, Ala.), or can be easily prepared using readily available materials. Such materials include phosphatidyl choline, cholesterol, phosphatidyl ethanolamine, dioleoylphosphatidyl choline (DOPC), dioleoylphosphatidyl glycerol (DOPG), dioleoylphoshatidyl ethanolamine (DOPE), among others. These materials can also be mixed with the DOTMA and DOTAP starting materials in appropriate ratios. Methods for making liposomes using these materials are well known in the art.

[0468] For example, commercially dioleoylphosphatidyl choline (DOPC), dioleoylphosphatidyl glycerol (DOPG), and dioleoylphosphatidyl ethanolamine (DOPE) can be used in various combinations to make conventional liposomes, with or without the addition of cholesterol. Thus, for example, DOPG/DOPC vesicles can be prepared by drying 50 mg each of DOPG and DOPC under a stream of nitrogen gas into a sonication vial. The sample is placed under a vacuum pump overnight and is hydrated the following day with deionized water. The sample is then sonicated for 2 hours in a capped vial, using a Heat Systems model 350 sonicator equipped with an inverted cup (bath type) probe at the maximum setting while the bath is circulated at 15EC. Alternatively, negatively charged vesicles can be prepared without sonication to produce multilamellar vesicles or by extrusion through nucleopore membranes to produce unilamellar vesicles of discrete size. Other methods are known and available to those of skill in the art.

[0469] The liposomes can comprise multilamellar vesicles (MLVs), small unilamellar vesicles (SUVs), or large unilamellar vesicles (LUVs), with SUVs being preferred. The various liposome-nucleic acid complexes are prepared using methods well known in the art. See, e.g., Straubinger et al., Methods of Immunology (1983), 101:512-527, which is herein incorporated by reference. For example, MLVs containing nucleic acid can be prepared by depositing a thin film of phospholipid on the walls of a glass tube and subsequently hydrating with a solution of the material to be encapsulated. SUVs are prepared by extended sonication of MLVs to produce a homogeneous population of unilamellar liposomes. The material to be entrapped is added to a suspension of preformed MLVs and then sonicated. When using liposomes containing cationic lipids, the dried lipid film is resuspended in an appropriate solution such as sterile water or an isotonic buffer solution such as 10 mM Tris/NaCl, sonicated, and then the preformed liposomes are mixed directly with the DNA. The liposome and DNA form a very stable complex due to binding of the positively charged liposomes to the cationic DNA. SUVs find use with small nucleic acid fragments. LUVs are prepared by a number of methods, well known in the art. Commonly used methods include Ca²⁺-EDTA chelation (Papahadjopoulos et al., Biochim. Biophys. Acta (1975) 394:483; Wilson et al., Cell 17:77 (1979); ether injection (Deamer, D. and Bangham, A., Biochim. Biophys. Acta 443:629 (1976); Ostro et al., Biochem. Biophys. Res. Commun. 76:836 (1977); Fraley et al., Proc. Natl. Acad. Sci. USA 76:3348 (1979)); detergent dialysis (Enoch, H. and Strittmatter, P., Proc. Natl. Acad. Sci. USA 76:145 (1979)); and reverse-phase evaporation (REV) (Fraley et al., J. Biol. Chem. 255:10431 (1980); Szoka et al., Proc. Natl. Acad. Sci. USA 75:145 (1978); Schaefer-Ridder et al., Science 215:166 (1982)), which are herein incorporated by reference.

[0470] Generally, the ratio of DNA to liposomes will be from about 10:1 to about 1:10. Preferably, the ration will be from about 5:1 to about 1:5. More preferably, the ration will be about 3:1 to about 1:3. Still more preferably, the ratio will be about 1:1.

[0471] U.S. Pat. No. 5,676,954 (which is herein incorporated by reference) reports on the injection of genetic material, complexed with cationic liposomes carriers, into mice. U.S. Pat. Nos. 4,897,355, 4,946,787, 5,049,386, 5,459,127, 5,589,466, 5,693,622, 5,580,859, 5,703,055, and international publication no. WO 94/9469 (which are herein incorporated by reference) provide cationic lipids for use in transfecting DNA into cells and mammals. U.S. Pat. Nos. 5,589,466, 5,693,622, 5,580,859, 5,703,055, and International Publication No. WO 94/9469 provide methods for delivering DNA-cationic lipid complexes to mammals.

[0472] In certain embodiments, cells are engineered, ex vivo or in vivo, using a retroviral particle containing RNA which comprises a sequence encoding a polypeptide of the present invention. Retroviruses from which the retroviral plasmid vectors may be derived include, but are not limited to, Moloney Murine Leukemia Virus, spleen necrosis virus, Rous sarcoma Virus, Harvey Sarcoma Virus, avian leukosis virus, gibbon ape leukemia virus, human immunodeficiency virus, Myeloproliferative Sarcoma Virus, and mammary tumor virus.

[0473] The retroviral plasmid vector is employed to transduce packaging cell lines to form producer cell lines. Examples of packaging cells which may be transfected include, but are not limited to, the PE501, PA317, R-2, R-AM, PA12, T19-14X, VT-19-17-H2, RCRE, RCRIP, GP+E-86, GP+envAm12, and DAN cell lines as described in Miller, Human Gene Therapy 1:5-14 (1990), which is incorporated herein by reference in its entirety. The vector may transduce the packaging cells through any means known in the art. Such means include, but are not limited to, electroporation, the use of liposomes, and CaPO₄ precipitation. In one alternative, the retroviral plasmid vector may be encapsulated into a liposome, or coupled to a lipid, and then administered to a host.

[0474] The producer cell line generates infectious retroviral vector particles which include polynucleotide encoding a polypeptide of the present invention. Such retroviral vector particles then may be employed, to transduce eukaryotic cells, either in vitro or in vivo. The transduced eukaryotic cells will express a polypeptide of the present invention.

[0475] In certain other embodiments, cells are engineered, ex vivo or in vivo, with polynucleotide contained in an adenovirus vector. Adenovirus can be manipulated such that it encodes and expresses a polypeptide of the present invention, and at the same time is inactivated in terms of its ability to replicate in a normal lytic viral life cycle. Adenovirus expression is achieved without integration of the viral DNA into the host cell chromosome, thereby alleviating concerns about insertional mutagenesis. Furthermore, adenoviruses have been used as live enteric vaccines for many years with an excellent safety profile (Schwartz, et al., Am. Rev. Respir. Dis.109:233-238 (1974)). Finally, adenovirus mediated gene transfer has been demonstrated in a number of instances including transfer of alpha-1-antitrypsin and CFTR to the lungs of cotton rats (Rosenfeld et al., Science 252:431-434 (1991); Rosenfeld et al., Cell 68:143-155 (1991)). Furthermore, extensive studies to attempt to establish adenovirus as a causative agent in human cancer were uniformly negative (Green et al., Proc. Natl. Acad. Sci. USA 76:6606 (1979)).

[0476] Suitable adenoviral vectors useful in the present invention are described, for example, in Kozarsky and Wilson, Curr. Opin. Genet. Devel. 3:499-503 (1993); Rosenfeld et al., Cell 68:143-155 (1992); Engelhardt et al., Human Genet. Ther. 4:759-769 (1993); Yang et al., Nature Genet. 7:362-369 (1994); Wilson et al., Nature 365:691-692 (1993); and U.S. Pat. No. 5,652,224, which are herein incorporated by reference. For example, the adenovirus vector Ad2 is useful and can be grown in human 293 cells. These cells contain the E1 region of adenovirus and constitutively express E1a and E1b, which complement the defective adenoviruses by providing the products of the genes deleted from the vector. In addition to Ad2, other varieties of adenovirus (e.g., Ad3, Ad5, and Ad7) are also useful in the present invention.

[0477] Preferably, the adenoviruses used in the present invention are replication deficient. Replication deficient adenoviruses require the aid of a helper virus and/or packaging cell line to form infectious particles. The resulting virus is capable of infecting cells and can express a polynucleotide of interest which is operably linked to a promoter, but cannot replicate in most cells. Replication deficient adenoviruses may be deleted in one or more of all or a portion of the following genes: E1a, E1b, E3, E4, E2a, or L1 through L5.

[0478] In certain other embodiments, the cells are engineered, ex vivo or in vivo, using an adeno-associated virus (AAV). AAVs are naturally occurring defective viruses that require helper viruses to produce infectious particles (Muzyczka, N., Curr. Topics in Microbiol. Immunol. 158:97 (1992)). It is also one of the few viruses that may integrate its DNA into non-dividing cells. Vectors containing as little as 300 base pairs of AAV can be packaged and can integrate, but space for exogenous DNA is limited to about 4.5 kb. Methods for producing and using such AAVs are known in the art. See, for example, U.S. Pat. Nos. 5,139,941, 5,173,414, 5,354,678, 5,436,146, 5,474,935, 5,478,745, and 5,589,377.

[0479] For example, an appropriate AAV vector for use in the present invention will include all the sequences necessary for DNA replication, encapsidation, and host-cell integration. The polynucleotide construct is inserted into the AAV vector using standard cloning methods, such as those found in Sambrook et al., Molecular Cloning: A Laboratory Manual, Cold Spring Harbor Press (1989). The recombinant AAV vector is then transfected into packaging cells which are infected with a helper virus, using any standard technique, including lipofection, electroporation, calcium phosphate precipitation, etc. Appropriate helper viruses include adenoviruses, cytomegaloviruses, vaccinia viruses, or herpes viruses. Once the packaging cells are transfected and infected, they will produce infectious AAV viral particles which contain the polynucleotide construct. These viral particles are then used to transduce eukaryotic cells, either ex vivo or in vivo. The transduced cells will contain the polynucleotide construct integrated into its genome, and will express a polypeptide of the invention.

[0480] Another method of gene therapy involves operably associating heterologous control regions and endogenous respiratory system antigen polynucleotide sequences (e.g., encoding a respiratory system antigen polypeptide of the present invention) via homologous recombination (see, e.g., U.S. Pat. No. 5,641,670, issued Jun. 24, 1997; International Publication No. WO 96/29411, published Sep. 26, 1996; International Publication No. WO 94/12650, published Aug. 4, 1994; Koller et al., Proc. Natl. Acad. Sci. USA 86:8932-8935 (1989); and Zijlstra et al., Nature 342:435-438 (1989), which are herein incorporated by reference. This method involves the activation of a gene which is present in the target cells, but which is not normally expressed in the cells, or is expressed at a lower level than desired.

[0481] Polynucleotide constructs are made, using standard techniques known in the art, which contain the promoter with targeting sequences flanking the promoter. Suitable promoters are described herein. The targeting sequence is sufficiently complementary to an endogenous sequence to permit homologous recombination of the promoter-targeting sequence with the endogenous sequence. The targeting sequence will be sufficiently near the 5′ end of the desired endogenous polynucleotide sequence so the promoter will be operably linked to the endogenous sequence upon homologous recombination.

[0482] The promoter and the targeting sequences can be amplified using PCR. Preferably, the amplified promoter contains distinct restriction enzyme sites on the 5′ and 3′ ends. Preferably, the 3′ end of the first targeting sequence contains the same restriction enzyme site as the 5′ end of the amplified promoter and the 5′ end of the second targeting sequence contains the same restriction site as the 3′ end of the amplified promoter. The amplified promoter and targeting sequences are digested and ligated together.

[0483] The promoter-targeting sequence construct is delivered to the cells, either as naked polynucleotide, or in conjunction with transfection-facilitating agents, such as liposomes, viral sequences, viral particles, whole viruses, lipofection, precipitating agents, etc., described in more detail above. The P promoter-targeting sequence can be delivered by any method, included direct needle injection, intravenous injection, topical administration, catheter infusion, particle accelerators, etc. The methods are described in more detail below.

[0484] The promoter-targeting sequence construct is taken up by cells. Homologous recombination between the construct and the endogenous sequence takes place, such that an endogenous sequence is placed under the control of the promoter. The promoter then drives the expression of the endogenous sequence.

[0485] The polynucleotide encoding a polypeptide of the present invention may contain a secretory signal sequence that facilitates secretion of the protein. Typically, the signal sequence is positioned in the coding region of the polynucleotide to be expressed towards or at the 5′ end of the coding region. The signal sequence may be homologous or heterologous to the respiratory system antigen polynucleotide of interest and may be homologous or heterologous to the cells to be transfected. Additionally, the signal sequence may be chemically synthesized using methods known in the art.

[0486] Any mode of administration of any of the above-described polynucleotides constructs can be used so long as the mode results in the expression of one or more molecules in an amount sufficient to provide a therapeutic effect. This includes direct needle injection, systemic injection, catheter infusion, biolistic injectors, particle accelerators (i.e., “gene guns”), gelfoam sponge depots, other commercially available depot materials, osmotic pumps (e.g., Alza minipumps), oral or suppositorial solid (tablet or pill) pharmaceutical formulations, and decanting or topical applications during surgery. For example, direct injection of naked calcium phosphate-precipitated plasmid into rat liver and rat spleen or a protein-coated plasmid into the portal vein has resulted in gene expression of the foreign gene in the rat livers (Kaneda et al., Science 243:375 (1989)).

[0487] A preferred method of local administration is by direct injection. Preferably, a recombinant molecule of the present invention complexed with a delivery vehicle is administered by direct injection into or locally within the area of arteries. Administration of a composition locally within the area of arteries refers to injecting the composition centimeters and preferably, millimeters within arteries.

[0488] Another method of local administration is to contact a polynucleotide construct of the present invention in or around a surgical wound. For example, a patient can undergo surgery and the polynucleotide construct can be coated on the surface of tissue inside the wound or the construct can be injected into areas of tissue inside the wound.

[0489] Therapeutic compositions useful in systemic administration, include recombinant molecules of the present invention complexed to a targeted delivery vehicle of the present invention. Suitable delivery vehicles for use with systemic administration comprise liposomes comprising ligands for targeting the vehicle to a particular site. In specific embodiments, suitable delivery vehicles for use with systemic administration comprise liposomes comprising polypeptides of the invention for targeting the vehicle to a particular site.

[0490] Preferred methods of systemic administration, include intravenous injection, aerosol, oral and percutaneous (topical) delivery. Intravenous injections can be performed using methods standard in the art. Aerosol delivery can also be performed using methods standard in the art (see, for example, Stribling et al., Proc. Natl. Acad. Sci. USA 189:11277-11281, 1992, which is incorporated herein by reference). Oral delivery can be performed by complexing a polynucleotide construct of the present invention to a carrier capable of withstanding degradation by digestive enzymes in the gut of an animal. Examples of such carriers, include plastic capsules or tablets, such as those known in the art. Topical delivery can be performed by mixing a polynucleotide construct of the present invention with a lipophilic reagent (e.g., DMSO) that is capable of passing into the skin.

[0491] Determining an effective amount of substance to be delivered can depend upon a number of factors including, for example, the chemical structure and biological activity of the substance, the age and weight of the animal, the precise condition requiring treatment and its severity, and the route of administration. The frequency of treatments depends upon a number of factors, such as the amount of polynucleotide constructs administered per dose, as well as the health and history of the subject. The precise amount, number of doses, and timing of doses will be determined by the attending physician or veterinarian.

[0492] Therapeutic compositions of the present invention can be administered to any animal, preferably to mammals and birds. Preferred mammals include humans, dogs, cats, mice, rats, rabbits sheep, cattle, horses and pigs, with humans being particularly preferred.

[0493] Biological Activities

[0494] Polynucleotides or polypeptides, or agonists or antagonists of the present invention, can be used in assays to test for one or more biological activities. If these polynucleotides or polypeptides, or agonists or antagonists of the present invention, do exhibit activity in a particular assay, it is likely that these molecules may be involved in the diseases associated with the biological activity. Thus, the polynucleotides and polypeptides, and agonists or antagonists could be used to treat, prevent diagnose and/or prognose the associated disease.

[0495] The respiratory system antigen polynucleotides and polypeptides of the invention are predicted to have predominant expression in respiratory system tissues.

[0496] Thus, the respiratory system antigens of the invention may be useful as therapeutic molecules. Each would be useful for diagnosis, detection, treatment and/or prevention of diseases or disorders of the respiratory system, including but not limited throat disorders (e.g., vocal cord paralysis, tonsillitis, and larynigitis), lung disorders (e.g., pneumonia, allegeric disorders (e.g., asthma and eosionphilic pheumonia), pleurisy, cystic fibrosis, emphysema, histiocytosis X, and sarcoidosis), nose disorders (rhinitis and sinusitis), neoplasms and/or cancers of respiratory tissues (e.g., throat cancer, lung cancer, and cancer of the nose), and/or those disorders as described under “Respiratory Disorders”.

[0497] In a preferred embodiment, polynucleotides of the invention (e.g., a nucleic acid sequence of SEQ ID NO:X or the complement thereof, or the cDNA sequence contained in Clone ID NO:Z, or fragments or variants thereof) and/or polypeptides of the invention (e.g., an amino acid sequence contained in SEQ ID NO:Y, an amino acid sequence encoded by SEQ ID NO:X, or the complement threof, an amino acid sequence encoded by the cDNA sequence contained in Clone ID NO:Z and fragments or variants thereof as described herein) are useful for the diagnosis, detection, treatement, and/or prevention of diseases or disorders of the tissues/cells corresponding to the library source disclosed in column 7 of Table 1A expressing the corresponding respiratory system sequence disclosed in the same row of Table 1A.

[0498] Particularly, the respiratory system antigens may be a useful therapeutic for cancer of respiratory system tissues. Treatment, diagnosis, detection, and/or prevention of respiratory system disorders could be carried out using a respiratory system antigen or soluble form of a respiratory system antigen, a respiratory system antigen ligand, gene therapy, or ex vivo applications. Moreover, inhibitors of a respiratory system antigen, either blocking antibodies or mutant forms, could modulate the expression of the respiratory system antigen. These inhibitors may be useful to treat, diagnose, detect, and/or prevent diseases associated with the misregulation of a respiratory system antigen.

[0499] In one embodiment, the invention provides a method for the specific delivery of compositions of the invention to cells (e.g., normal or diseased respiratory system cells) by administering polypeptides of the invention (e.g., respiratory system antigen polypeptides or anti-respiratory system antigen antibodies) that are associated with heterologous polypeptides or nucleic acids. In one example, the invention provides a method for delivering a therapeutic protein into the targeted cell (e.g., an aberrant respiratory system cell or respiratory system cancer cell). In another example, the invention provides a method for delivering a single stranded nucleic acid (e.g., antisense or ribozymes) or double stranded nucleic acid (e.g., DNA that can integrate into the cell's genome or replicate episomally and that can be transcribed) into the targeted cell.

[0500] In another embodiment, the invention provides a method for the specific destruction of cells (e.g., the destruction of aberrant respiratory system cells, including, but not limited to, respiratory system tumor cells) by administering polypeptides of the invention (e.g., respiratory system antigen polypeptides or fragments thereof, or anti-respiratory system antigen antibodies) in association with toxins or cytotoxic prodrugs.

[0501] By “toxin” is meant compounds that bind and activate endogenous cytotoxic effector systems, radioisotopes, holotoxins, modified toxins, catalytic subunits of toxins, cytotoxins (cytotoxic agents), or any molecules or enzymes not normally present in or on the surface of a cell that under defined conditions cause the cell's death. Toxins that may be used according to the methods of the invention include, but are not limited to, radioisotopes known in the art, compounds such as, for example, antibodies (or complement fixing containing portions thereof) that bind an inherent or induced endogenous cytotoxic effector system, thymidine kinase, endonuclease, RNAse, alpha toxin, ricin, abrin, Pseudomonas exotoxin A, diphtheria toxin, saporin, momordin, gelonin, pokeweed antiviral protein, alpha-sarcin and cholera toxin. “Toxin” also includes a cytostatic or cytocidal agent, a therapeutic agent or a radioactive metal ion, e.g., alpha-emitters such as, for example, ²¹³Bi, or other radioisotopes such as, for example, ¹⁰³Pd, ¹³³Xe , ¹³¹I, ⁶⁸Ge, ⁵⁷Co, ⁶⁵Zn, ⁸⁵Sr, ³²P, ³⁵S, ⁹⁰Y, ¹⁵³Sm, ¹⁵³Gd, ¹⁶⁹Yb, ⁵¹Cr, ⁵⁴Mn, ⁷⁵Se, ¹¹³Sn, ⁹⁰Yttrium, ¹¹⁷Tin, ¹⁸⁶Rhenium, ¹⁶⁶Holmium, and ¹⁸⁸Rhenium; luminescent labels, such as luminol; and fluorescent labels, such as fluorescein and rhodamine, and biotin.

[0502] Techniques known in the art may be applied to label antibodies of the invention. Such techniques include, but are not limited to, the use of bifunctional conjugating agents (see e.g., U.S. Pat. Nos. 5,756,065; 5,714,631; 5,696,239; 5,652,361; 5,505,931; 5,489,425; 5,435,990; 5,428,139; 5,342,604; 5,274,119; 4,994,560; and 5,808,003; the contents of each of which are hereby incorporated by reference in its entirety). A cytotoxin or cytotoxic agent includes any agent that is detrimental to cells. Examples include paclitaxol, cytochalasin B, gramicidin D, ethidium bromide, emetine, mitomycin, etoposide, tenoposide, vincristine, vinblastine, colchicin, doxorubicin, daunorubicin, dihydroxy anthracin dione, mitoxantrone, mithramycin, actinomycin D, 1-dehydrotestosterone, glucocorticoids, procaine, tetracaine, lidocaine, propranolol, and puromycin and analogs or homologs thereof. Therapeutic agents include, but are not limited to, antimetabolites (e.g., methotrexate, 6-mercaptopurine, 6-thioguanine, cytarabine, 5-fluorouracil decarbazine), alkylating agents (e.g., mechlorethamine, thioepa chlorambucil, melphalan, carmustine (BSNU) and lomustine (CCNU), cyclothosphamide, busulfan, dibromomannitol, streptozotocin, mitomycin C, and cis- dichlorodiamine platinum (II) (DDP) cisplatin), anthracyclines (e.g., daunorubicin (formerly daunomycin) and doxorubicin), antibiotics (e.g., dactinomycin (formerly actinomycin), bleomycin, mithramycin, and anthramycin (AMC)), and anti-mitotic agents (e.g., vincristine and vinblastine).

[0503] By “cytotoxic prodrug” is meant a non-toxic compound that is converted by an enzyme, normally present in the cell, into a cytotoxic compound. Cytotoxic prodrugs that may be used according to the methods of the invention include, but are not limited to, glutamyl derivatives of benzoic acid mustard alkylating agent, phosphate derivatives of etoposide or mitomycin C, cytosine arabinoside, daunorubisin, and phenoxyacetamide derivatives of doxorubicin.

[0504] It will be appreciated that conditions caused by a decrease in the standard or normal level of a respiratory system antigen activity in an individual, particularly disorders of the respiratory system, can be treated by administration of a respiratory system antigen polypeptide (e.g., such as, for example, the complete respiratory system antigen polypeptide, the soluble form of the extracellular domain of a respiratory system antigen polypeptide, or cells expressing the complete protein) or agonist. Thus, the invention also provides a method of treatment of an individual in need of an increased level of respiratory system antigen activity comprising administering to such an individual a pharmaceutical composition comprising an amount of an isolated respiratory system antigen polypeptide of the invention, or agonist thereof (e.g., an agonistic anti-respiratory system antigen antibody), effective to increase the respiratory system antigen activity level in such an individual.

[0505] It will also be appreciated that conditions caused by a increase in the standard or normal level of respiratory system antigen activity in an individual, particularly disorders of the respiratory system, can be treated by administration of respiratory system antigen polypeptides (e.g., such as, for example, the complete respiratory system antigen polypeptide, the soluble form of the extracellular domain of a respiratory system antigen polypeptide, or cells expressing the complete protein) or antagonist (e.g., an antagonistic respiratory system antigen antibody). Thus, the invention also provides a method of treatment of an individual in need of an decreased level of respiratory system antigen activity comprising administering to such an individual a pharmaceutical composition comprising an amount of an isolated respiratory system antigen polypeptide of the invention, or antagonist thereof (e.g., an antagonistic anti-respiratory system antigen antibody), effective to decrease the respiratory system antigen activity level in such an individual.

[0506] In certain embodiments, a polypeptide of the invention, or polynucleotides, antibodies, agonists, or antagonists corresponding to that polypeptide, may be used to diagnose and/or prognose diseases and/or disorders associated with the tissue(s) in which the polypeptide of the invention is expressed, including one, two, three, four, five, or more tissues disclosed in Table 1A, column 7 (Tissue Distribution Library Code).

[0507] More generally, polynucleotides, translation products and antibodies corresponding to this gene may be useful for the diagnosis, prognosis, prevention, and/or treatment of diseases and/or disorders associated with the following systems.

[0508] Respiratory Disorders

[0509] Polynucleotides or polypeptides, or agonists or antagonists of the present invention may be used to treat, prevent, diagnose, and/or prognose diseases and/or disorders of the respiratory system.

[0510] Diseases and disorders of the respiratory system include, but are not limited to, nasal vestibulitis, nonallergic rhinitis (e.g., acute rhinitis, chronic rhinitis, atrophic rhinitis, vasomotor rhinitis), nasal polyps, and sinusitis, juvenile angiofibromas, cancer of the nose and juvenile papillomas, vocal cord polyps, nodules (singer's nodules), contact ulcers, vocal cord paralysis, laryngoceles, pharyngitis (e.g., viral and bacterial), tonsillitis, tonsillar cellulitis, parapharyngeal abscess, laryngitis, laryngoceles, and throat cancers (e.g., cancer of the nasopharynx, tonsil cancer, larynx cancer), lung cancer (e.g., squamous cell carcinoma, small cell (oat cell) carcinoma, large cell carcinoma, and adenocarcinoma), allergic disorders (eosinophilic pneumonia, hypersensitivity pneumonitis (e.g., extrinsic allergic alveolitis, allergic interstitial pneumonitis, organic dust pneumoconiosis, allergic bronchopulmonary aspergillosis, asthma, Wegener's granulomatosis (granulomatous vasculitis), Goodpasture's syndrome)), pneumonia (e.g., bacterial pneumonia (e.g., Streptococcus pneumoniae (pneumoncoccal pneumonia), Staphylococcus aureus (staphylococcal pneumonia), Gram-negative bacterial pneumonia (caused by, e.g., Klebsiella and Pseudomas spp.), Mycoplasma pneumoniae pneumonia, Hemophilus influenzae pneumonia, Legionella pneumophila (Legionnaires' disease), and Chlamydia psittaci (Psittacosis)), and viral pneumonia (e.g., influenza, chickenpox (varicella).

[0511] Additional diseases and disorders of the respiratory system include, but are not limited to bronchiolitis, polio (poliomyelitis), croup, respiratory syncytial viral infection, mumps, erythema infectiosum (fifth disease), roseola infantum, progressive rubella panencephalitis, german measles, and subacute sclerosing panencephalitis), fungal pneumonia (e.g., Histoplasmosis, Coccidioidomycosis, Blastomycosis, fungal infections in people with severely suppressed immune systems (e.g., cryptococcosis, caused by Cryptococcus neoformans; aspergillosis, caused by Aspergillus spp.; candidiasis, caused by Candida; and mucormycosis)), Pneumocystis carinii (pneumocystis pneumonia), atypical pneumonias (e.g., Mycoplasma and Chlamydia spp.), opportunistic infection pneumonia, nosocomial pneumonia, chemical pneumonitis, and aspiration pneumonia, pleural disorders (e.g., pleurisy, pleural effusion, and pneumothorax (e.g., simple spontaneous pneumothorax, complicated spontaneous pneumothorax, tension pneumothorax)), obstructive airway diseases (e.g., asthma, chronic obstructive pulmonary disease (COPD), emphysema, chronic or acute bronchitis), occupational lung diseases (e.g., silicosis, black lung (coal workers' pneumoconiosis), asbestosis, berylliosis, occupational asthsma, byssinosis, and benign pneumoconioses), Infiltrative Lung Disease (e.g., pulmonary fibrosis (e.g., fibrosing alveolitis, usual interstitial pneumonia), idiopathic pulmonary fibrosis, desquamative interstitial pneumonia, lymphoid interstitial pneumonia, histiocytosis X (e.g., Letterer-Siwe disease, Hand-Schüller-Christian disease, eosinophilic granuloma), idiopathic pulmonary hemosiderosis, sarcoidosis and pulmonary alveolar proteinosis), Acute respiratory distress syndrome (also called, e.g., adult respiratory distress syndrome), edema, pulmonary embolism, bronchitis (e.g., viral, bacterial), bronchiectasis, atelectasis, lung abscess (caused by, e.g., Staphylococcus aureus or Legionella pneumophila), and cystic fibrosis.

[0512] Immune Activity

[0513] Polynucleotides, polypeptides, antibodies, and/or agonists or antagonists of the present invention may be useful in treating, preventing, diagnosing and/or prognosing diseases, disorders, and/or conditions of the immune system, by, for example, activating or inhibiting the proliferation, differentiation, or mobilization (chemotaxis) of immune cells. Immune cells develop through a process called hematopoiesis, producing myeloid (platelets, red blood cells, neutrophils, and macrophages) and lymphoid (B and T lymphocytes) cells from pluripotent stem cells. The etiology of these immune diseases, disorders, and/or conditions may be genetic, somatic, such as cancer and some autoimmune diseases, acquired (e.g., by chemotherapy or toxins), or infectious. Moreover, polynucleotides, polypeptides, antibodies, and/or agonists or antagonists of the present invention can be used as a marker or detector of a particular immune system disease or disorder.

[0514] In another embodiment, a polypeptide of the invention, or polynucleotides, antibodies, agonists, or antagonists corresponding to that polypeptide, may be used to treat diseases and disorders of the immune system and/or to inhibit or enhance an immune response generated by cells associated with the tissue(s) in which the polypeptide of the invention is expressed, including one, two, three, four, five, or more tissues disclosed in Table 1A, column 7 (Tissue Distribution Library Code).

[0515] Polynucleotides, polypeptides, antibodies, and/or agonists or antagonists of the present invention may be useful in treating, preventing, diagnosing, and/or prognosing immunodeficiencies, including both congenital and acquired immunodeficiencies. Examples of B cell immunodeficiencies in which immunoglobulin levels B cell function and/or B cell numbers are decreased include: X-linked agammaglobulinemia (Bruton's disease), X-linked infantile agammaglobulinemia, X-linked immunodeficiency with hyper IgM, non X-linked immunodeficiency with hyper IgM, X-linked lymphoproliferative syndrome (XLP), agammaglobulinemia including congenital and acquired agammaglobulinemia, adult onset agammaglobulinemia, late-onset agammaglobulinemia, dysgammaglobulinemia, hypogammaglobulinemia, unspecified hypogammaglobulinemia, recessive agammaglobulinemia (Swiss type), Selective IgM deficiency, selective IgA deficiency, selective IgG subclass deficiencies, IgG subclass deficiency (with or without IgA deficiency), Ig deficiency with increased IgM, IgG and IgA deficiency with increased IgM, antibody deficiency with normal or elevated Igs, Ig heavy chain deletions, kappa chain deficiency, B cell lymphoproliferative disorder (BLPD), common variable immunodeficiency (CVID), common variable immunodeficiency (CVI) (acquired), and transient hypogammaglobulinemia of infancy.

[0516] In specific embodiments, ataxia-telangiectasia or conditions associated with ataxia-telangiectasia are treated, prevented, diagnosed, and/or prognosing using the polypeptides or polynucleotides of the invention, and/or agonists or antagonists thereof.

[0517] Examples of congenital immunodeficiencies in which T cell and/or B cell function and/or number is decreased include, but are not limited to: DiGeorge anomaly, severe combined immunodeficiencies (SCID) (including, but not limited to, X-linked SCID, autosomal recessive SCID, adenosine deaminase deficiency, purine nucleoside phosphorylase (PNP) deficiency, Class II MHC deficiency (Bare lymphocyte syndrome), Wiskott-Aldrich syndrome, and ataxia telangiectasia), thymic hypoplasia, third and fourth pharyngeal pouch syndrome, 22q11.2 deletion, chronic mucocutaneous candidiasis, natural killer cell deficiency (NK), idiopathic CD4+ T-lymphocytopenia, immunodeficiency with predominant T cell defect (unspecified), and unspecified immunodeficiency of cell mediated immunity.

[0518] In specific embodiments, DiGeorge anomaly or conditions associated with DiGeorge anomaly are treated, prevented, diagnosed, and/or prognosed using polypeptides or polynucleotides of the invention, or antagonists or agonists thereof.

[0519] Other immunodeficiencies that may be treated, prevented, diagnosed, and/or prognosed using polypeptides or polynucleotides of the invention, and/or agonists or antagonists thereof, include, but are not limited to, chronic granulomatous disease, Chediak-Higashi syndrome, myeloperoxidase deficiency, leukocyte glucose-6-phosphate dehydrogenase deficiency, X-linked lymphoproliferative syndrome (XLP), leukocyte adhesion deficiency, complement component deficiencies (including C1, C2, C3, C4, C5, C6, C7, C8 and/or C9 deficiencies), reticular dysgenesis, thymic alymphoplasia-aplasia, immunodeficiency with thymoma, severe congenital leukopenia, dysplasia with immunodeficiency, neonatal neutropenia, short limbed dwarfism, and Nezelof syndrome-combined immunodeficiency with Igs.

[0520] In a preferred embodiment, the immunodeficiencies and/or conditions associated with the immunodeficiencies recited above are treated, prevented, diagnosed and/or prognosed using polynucleotides, polypeptides, antibodies, and/or agonists or antagonists of the present invention.

[0521] In a preferred embodiment polynucleotides, polypeptides, antibodies, and/or agonists or antagonists of the present invention could be used as an agent to boost immunoresponsiveness among immunodeficient individuals. In specific embodiments, polynucleotides, polypeptides, antibodies, and/or agonists or antagonists of the present invention could be used as an agent to boost immunoresponsiveness among B cell and/or T cell immunodeficient individuals.

[0522] The polynucleotides, polypeptides, antibodies, and/or agonists or antagonists of the present invention may be useful in treating, preventing, diagnosing and/or prognosing autoimmune disorders. Many autoimmune disorders result from inappropriate recognition of self as foreign material by immune cells. This inappropriate recognition results in an immune response leading to the destruction of the host tissue. Therefore, the administration of polynucleotides and polypeptides of the invention that can inhibit an immune response, particularly the proliferation, differentiation, or chemotaxis of T-cells, may be an effective therapy in preventing autoimmune disorders.

[0523] Autoimmune diseases or disorders that may be treated, prevented, diagnosed and/or prognosed by polynucleotides, polypeptides, antibodies, and/or agonists or antagonists of the present invention include, but are not limited to, one or more of the following: systemic lupus erythematosus, rheumatoid arthritis, ankylosing spondylitis, multiple sclerosis, autoimmune thyroiditis, Hashimoto's thyroiditis, autoimmune hemolytic anemia, hemolytic anemia, thrombocytopenia, autoimmune thrombocytopenia purpura, autoimmune neonatal thrombocytopenia, idiopathic thrombocytopenia purpura, purpura (e.g., Henloch-Scoenlein purpura), autoimmunocytopenia, Goodpasture's syndrome, Pemphigus vulgaris, myasthenia gravis, Grave's disease (hyperthyroidism), and insulin-resistant diabetes mellitus.

[0524] Additional disorders that are likely to have an autoimmune component that may be treated, prevented, and/or diagnosed with the compositions of the invention include, but are not limited to, type II collagen-induced arthritis, antiphospholipid syndrome, dermatitis, allergic encephalomyelitis, myocarditis, relapsing polychondritis, rheumatic heart disease, neuritis, uveitis ophthalmia, polyendocrinopathies, Reiter's Disease, Stiff-Man Syndrome, autoimmune pulmonary inflammation, autism, Guillain-Barre Syndrome, insulin dependent diabetes mellitus, and autoimmune inflammatory eye disorders.

[0525] Additional disorders that are likely to have an autoimmune component that may be treated, prevented, diagnosed and/or prognosed with the compositions of the invention include, but are not limited to, scleroderma with anti-collagen antibodies (often characterized, e.g., by nucleolar and other nuclear antibodies), mixed connective tissue disease (often characterized, e.g., by antibodies to extractable nuclear antigens (e.g., ribonucleoprotein)), polymyositis (often characterized, e.g., by nonhistone ANA), pernicious anemia (often characterized, e.g., by antiparietal cell, microsomes, and intrinsic factor antibodies), idiopathic Addison's disease (often characterized, e.g., by humoral and cell-mediated adrenal cytotoxicity, infertility (often characterized, e.g., by antispermatozoal antibodies), glomerulonephritis (often characterized, e.g., by glomerular basement membrane antibodies or immune complexes), bullous pemphigoid (often characterized, e.g., by IgG and complement in basement membrane), Sjogren's syndrome (often characterized, e.g., by multiple tissue antibodies, and/or a specific nonhistone ANA (SS-B)), diabetes mellitus (often characterized, e.g., by cell-mediated and humoral islet cell antibodies), and adrenergic drug resistance (including adrenergic drug resistance with asthma or cystic fibrosis) (often characterized, e.g., by beta-adrenergic receptor antibodies).

[0526] Additional disorders that may have an autoimmune component that may be treated, prevented, diagnosed and/or prognosed with the compositions of the invention include, but are not limited to, chronic active hepatitis (often characterized, e.g., by smooth muscle antibodies), primary biliary cirrhosis (often characterized, e.g., by mitochondria antibodies), other endocrine gland failure (often characterized, e.g., by specific tissue antibodies in some cases), vitiligo (often characterized, e.g., by melanocyte antibodies), vasculitis (often characterized, e.g., by Ig and complement in vessel walls and/or low serum complement), post-MI (often characterized, e.g., by myocardial antibodies), cardiotomy syndrome (often characterized, e.g., by myocardial antibodies), urticaria (often characterized, e.g., by IgG and IgM antibodies to IgE), atopic dermatitis (often characterized, e.g., by IgG and IgM antibodies to IgE), asthma (often characterized, e.g., by IgG and IgM antibodies to IgE), and many other inflammatory, granulomatous, degenerative, and atrophic disorders.

[0527] In a preferred embodiment, the autoimmune diseases and disorders and/or conditions associated with the diseases and disorders recited above are treated, prevented, diagnosed and/or prognosed using for example, antagonists or agonists, polypeptides or polynucleotides, or antibodies of the present invention. In a specific preferred embodiment, rheumatoid arthritis is treated, prevented, and/or diagnosed using polynucleotides, polypeptides, antibodies, and/or agonists or antagonists of the present invention.

[0528] In another specific preferred embodiment, systemic lupus erythematosus is treated, prevented, and/or diagnosed using polynucleotides, polypeptides, antibodies, and/or agonists or antagonists of the present invention. In another specific preferred embodiment, idiopathic thrombocytopenia purpura is treated, prevented, and/or diagnosed using polynucleotides, polypeptides, antibodies, and/or agonists or antagonists of the present invention.

[0529] In another specific preferred embodiment IgA nephropathy is treated, prevented, and/or diagnosed using polynucleotides, polypeptides, antibodies, and/or agonists or antagonists of the present invention.

[0530] In a preferred embodiment, the autoimmune diseases and disorders and/or conditions associated with the diseases and disorders recited above are treated, prevented, diagnosed and/or prognosed using polynucleotides, polypeptides, antibodies, and/or agonists or antagonists of the present invention.

[0531] In preferred embodiments, polypeptides, antibodies, polynucleotides and/or agonists or antagonists of the present invention are used as a immunosuppressive agent(s).

[0532] Polynucleotides, polypeptides, antibodies, and/or agonists or antagonists of the present invention may be useful in treating, preventing, prognosing, and/or diagnosing diseases, disorders, and/or conditions of hematopoietic cells. Polynucleotides, polypeptides, antibodies, and/or agonists or antagonists of the present invention could be used to increase differentiation and proliferation of hematopoietic cells, including the pluripotent stem cells, in an effort to treat or prevent those diseases, disorders, and/or conditions associated with a decrease in certain (or many) types hematopoietic cells, including but not limited to, leukopenia, neutropenia, anemia, and thrombocytopenia. Alternatively, Polynucleotides, polypeptides, antibodies, and/or agonists or antagonists of the present invention could be used to increase differentiation and proliferation of hematopoietic cells, including the pluripotent stem cells, in an effort to treat or prevent those diseases, disorders, and/or conditions associated with an increase in certain (or many) types of hematopoietic cells, including but not limited to, histiocytosis.

[0533] Allergic reactions and conditions, such as asthma (particularly allergic asthma) or other respiratory problems, may also be treated, prevented, diagnosed and/or prognosed using polypeptides, antibodies, or polynucleotides of the invention, and/or agonists or antagonists thereof. Moreover, these molecules can be used to treat, prevent, prognose, and/or diagnose anaphylaxis, hypersensitivity to an antigenic molecule, or blood group incompatibility.

[0534] Additionally, polypeptides or polynucleotides of the invention, and/or agonists or antagonists thereof, may be used to treat, prevent, diagnose and/or prognose IgE-mediated allergic reactions. Such allergic reactions include, but are not limited to, asthma, rhinitis, and eczema. In specific embodiments, polynucleotides, polypeptides, antibodies, and/or agonists or antagonists of the present invention may be used to modulate IgE concentrations in vitro or in vivo.

[0535] Moreover, polynucleotides, polypeptides, antibodies, and/or agonists or antagonists of the present invention have uses in the diagnosis, prognosis, prevention, and/or treatment of inflammatory conditions. For example, since polypeptides, antibodies, or polynucleotides of the invention, and/or agonists or antagonists of the invention may inhibit the activation, proliferation and/or differentiation of cells involved in an inflammatory response, these molecules can be used to prevent and/or treat chronic and acute inflammatory conditions. Such inflammatory conditions include, but are not limited to, for example, inflammation associated with infection (e.g., septic shock, sepsis, or systemic inflammatory response syndrome), ischemia-reperfusion injury, endotoxin lethality, complement-mediated hyperacute rejection, nephritis, cytokine or chemokine induced lung injury, inflammatory bowel disease, Crohn's disease, over production of cytokines (e.g., TNF or IL-1.), respiratory disorders (e.g., asthma and allergy); gastrointestinal disorders (e.g., inflammatory bowel disease); cancers (e.g., gastric, ovarian, lung, bladder, liver, and breast); CNS disorders (e.g., multiple sclerosis; ischemic brain injury and/or stroke, traumatic brain injury, neurodegenerative disorders (e.g., Parkinson's disease and Alzheimer's disease); AIDS-related dementia; and prion disease); cardiovascular disorders (e.g., atherosclerosis, myocarditis, cardiovascular disease, and cardiopulmonary bypass complications); as well as many additional diseases, conditions, and disorders that are characterized by inflammation (e.g., hepatitis, rheumatoid arthritis, gout, trauma, pancreatitis, sarcoidosis, dermatitis, renal ischemia-reperfusion injury, Grave's disease, systemic lupus erythematosus, diabetes mellitus, and allogenic transplant rejection).

[0536] Because inflammation is a fundamental defense mechanism, inflammatory disorders can effect virtually any tissue of the body. Accordingly, polynucleotides, polypeptides, and antibodies of the invention, as well as agonists or antagonists thereof, have uses in the treatment of tissue-specific inflammatory disorders, including, but not limited to, adrenalitis, alveolitis, angiocholecystitis, appendicitis, balanitis, blepharitis, bronchitis, bursitis, carditis, cellulitis, cervicitis, cholecystitis, chorditis, cochlitis, colitis, conjunctivitis, cystitis, dermatitis, diverticulitis, encephalitis, endocarditis, esophagitis, eustachitis, fibrositis, folliculitis, gastritis, gastroenteritis, gingivitis, glossitis, hepatosplenitis, keratitis, labyrinthitis, laryngitis, lymphangitis, mastitis, media otitis, meningitis, metritis, mucitis, myocarditis, myosititis, myringitis, nephritis, neuritis, orchitis, osteochondritis, otitis, pericarditis, peritendonitis, peritonitis, pharyngitis, phlebitis, poliomyelitis, prostatitis, pulpitis, retinitis, rhinitis, salpingitis, scleritis, sclerochoroiditis, scrotitis, sinusitis, spondylitis, steatitis, stomatitis, synovitis, syringitis, tendonitis, tonsillitis, urethritis, and vaginitis.

[0537] In specific embodiments, polypeptides, antibodies, or polynucleotides of the invention, and/or agonists or antagonists thereof, are useful to diagnose, prognose, prevent, and/or treat organ transplant rejections and graft-versus-host disease. Organ rejection occurs by host immune cell destruction of the transplanted tissue through an immune response. Similarly, an immune response is also involved in GVHD, but, in this case, the foreign transplanted immune cells destroy the host tissues. Polypeptides, antibodies, or polynucleotides of the invention, and/or agonists or antagonists thereof, that inhibit an immune response, particularly the activation, proliferation, differentiation, or chemotaxis of T-cells, may be an effective therapy in preventing organ rejection or GVHD. In specific embodiments, polypeptides, antibodies, or polynucleotides of the invention, and/or agonists or antagonists thereof, that inhibit an immune response, particularly the activation, proliferation, differentiation, or chemotaxis of T-cells, may be an effective therapy in preventing experimental allergic and hyperacute xenograft rejection.

[0538] In other embodiments, polypeptides, antibodies, or polynucleotides of the invention, and/or agonists or antagonists thereof, are useful to diagnose, prognose, prevent, and/or treat immune complex diseases, including, but not limited to, serum sickness, post streptococcal glomerulonephritis, polyarteritis nodosa, and immune complex-induced vasculitis.

[0539] Polypeptides, antibodies, polynucleotides and/or agonists or antagonists of the invention can be used to treat, detect, and/or prevent infectious agents. For example, by increasing the immune response, particularly increasing the proliferation activation and/or differentiation of B and/or T cells, infectious diseases may be treated, detected, and/or prevented. The immune response may be increased by either enhancing an existing immune response, or by initiating a new immune response. Alternatively, polynucleotides, polypeptides, antibodies, and/or agonists or antagonists of the present invention may also directly inhibit the infectious agent (refer to section of application listing infectious agents, etc), without necessarily eliciting an immune response.

[0540] In another embodiment, polypeptides, antibodies, polynucleotides and/or agonists or antagonists of the present invention are used as a vaccine adjuvant that enhances immune responsiveness to an antigen. In a specific embodiment, polypeptides, antibodies, polynucleotides and/or agonists or antagonists of the present invention are used as an adjuvant to enhance tumor-specific immune responses.

[0541] In another specific embodiment, polypeptides, antibodies, polynucleotides and/or agonists or antagonists of the present invention are used as an adjuvant to enhance anti-viral immune responses. Anti-viral immune responses that may be enhanced using the compositions of the invention as an adjuvant, include virus and virus associated diseases or symptoms described herein or otherwise known in the art. In specific embodiments, the compositions of the invention are used as an adjuvant to enhance an immune response to a virus, disease, or symptom selected from the group consisting of: AIDS, meningitis, Dengue, EBV, and hepatitis (e.g., hepatitis B). In another specific embodiment, the compositions of the invention are used as an adjuvant to enhance an immune response to a virus, disease, or symptom selected from the group consisting of: HIV/AIDS, respiratory syncytial virus, Dengue, rotavirus, Japanese B encephalitis, influenza A and B, parainfluenza, measles, cytomegalovirus, rabies, Junin, Chikungunya, Rift Valley Fever, herpes simplex, and yellow fever.

[0542] In another specific embodiment, polypeptides, antibodies, polynucleotides and/or agonists or antagonists of the present invention are used as an adjuvant to enhance anti-bacterial or anti-fungal immune responses. Anti-bacterial or anti-fungal immune responses that may be enhanced using the compositions of the invention as an adjuvant, include bacteria or fungus and bacteria or fungus associated diseases or symptoms described herein or otherwise known in the art. In specific embodiments, the compositions of the invention are used as an adjuvant to enhance an immune response to a bacteria or fungus, disease, or symptom selected from the group consisting of: tetanus, Diphtheria, botulism, and meningitis type B.

[0543] In another specific embodiment, the compositions of the invention are used as an adjuvant to enhance an immune response to a bacteria or fungus, disease, or symptom selected from the group consisting of: Vibrio cholerae, Mycobacterium leprae, Salmonella typhi, Salmonella paratyphi, Meisseria meningitidis, Streptococcus pneumoniae, Group B streptococcus, Shigella spp., Enterotoxigenic Escherichia coli, Enterohemorrhagic E. coli, and Borrelia burgdorferi.

[0544] In another specific embodiment, polypeptides, antibodies, polynucleotides and/or agonists or antagonists of the present invention are used as an adjuvant to enhance anti-parasitic immune responses. Anti-parasitic immune responses that may be enhanced using the compositions of the invention as an adjuvant, include parasite and parasite associated diseases or symptoms described herein or otherwise known in the art. In specific embodiments, the compositions of the invention are used as an adjuvant to enhance an immune response to a parasite. In another specific embodiment, the compositions of the invention are used as an adjuvant to enhance an immune response to Plasmodium (malaria) or Leishmania.

[0545] In another specific embodiment, polypeptides, antibodies, polynucleotides and/or agonists or antagonists of the present invention may also be employed to treat infectious diseases including silicosis, sarcoidosis, and idiopathic pulmonary fibrosis; for example, by preventing the recruitment and activation of mononuclear phagocytes.

[0546] In another specific embodiment, polypeptides, antibodies, polynucleotides and/or agonists or antagonists of the present invention are used as an antigen for the generation of antibodies to inhibit or enhance immune mediated responses against polypeptides of the invention.

[0547] In one embodiment, polypeptides, antibodies, polynucleotides and/or agonists or antagonists of the present invention are administered to an animal (e.g., mouse, rat, rabbit, hamster, guinea pig, pigs, micro-pig, chicken, camel, goat, horse, cow, sheep, dog, cat, non-human primate, and human, most preferably human) to boost the immune system to produce increased quantities of one or more antibodies (e.g., IgG, IgA, IgM, and IgE), to induce higher affinity antibody production and immunoglobulin class switching (e.g., IgG, IgA, IgM, and IgE), and/or to increase an immune response.

[0548] In another specific embodiment, polypeptides, antibodies, polynucleotides and/or agonists or antagonists of the present invention are used as a stimulator of B cell responsiveness to pathogens.

[0549] In another specific embodiment, polypeptides, antibodies, polynucleotides and/or agonists or antagonists of the present invention are used as an activator of T cells.

[0550] In another specific embodiment, polypeptides, antibodies, polynucleotides and/or agonists or antagonists of the present invention are used as an agent that elevates the immune status of an individual prior to their receipt of immunosuppressive therapies.

[0551] In another specific embodiment, polypeptides, antibodies, polynucleotides and/or agonists or antagonists of the present invention are used as an agent to induce higher affinity antibodies.

[0552] In another specific embodiment, polypeptides, antibodies, polynucleotides and/or agonists or antagonists of the present invention are used as an agent to increase serum immunoglobulin concentrations.

[0553] In another specific embodiment, polypeptides, antibodies, polynucleotides and/or agonists or antagonists of the present invention are used as an agent to accelerate recovery of immunocompromised individuals.

[0554] In another specific embodiment, polypeptides, antibodies, polynucleotides and/or agonists or antagonists of the present invention are used as an agent to boost immunoresponsiveness among aged populations and/or neonates.

[0555] In another specific embodiment, polypeptides, antibodies, polynucleotides and/or agonists or antagonists of the present invention are used as an immune system enhancer prior to, during, or after bone marrow transplant and/or other transplants (e.g., allogeneic or xenogeneic organ transplantation). With respect to transplantation, compositions of the invention may be administered prior to, concomitant with, and/or after transplantation. In a specific embodiment, compositions of the invention are administered after transplantation, prior to the beginning of recovery of T-cell populations. In another specific embodiment, compositions of the invention are first administered after transplantation after the beginning of recovery of T cell populations, but prior to full recovery of B cell populations.

[0556] In another specific embodiment, polypeptides, antibodies, polynucleotides and/or agonists or antagonists of the present invention are used as an agent to boost immunoresponsiveness among individuals having an acquired loss of B cell function. Conditions resulting in an acquired loss of B cell function that may be ameliorated or treated by administering the polypeptides, antibodies, polynucleotides and/or agonists or antagonists thereof, include, but are not limited to, HIV Infection, AIDS, bone marrow transplant, and B cell chronic lymphocytic leukemia (CLL).

[0557] In another specific embodiment, polypeptides, antibodies, polynucleotides and/or agonists or antagonists of the present invention are used as an agent to boost immunoresponsiveness among individuals having a temporary immune deficiency. Conditions resulting in a temporary immune deficiency that may be ameliorated or treated by administering the polypeptides, antibodies, polynucleotides and/or agonists or antagonists thereof, include, but are not limited to, recovery from viral infections (e.g., influenza), conditions associated with malnutrition, recovery from infectious mononucleosis, or conditions associated with stress, recovery from measles, recovery from blood transfusion, and recovery from surgery.

[0558] In another specific embodiment, polypeptides, antibodies, polynucleotides and/or agonists or antagonists of the present invention are used as a regulator of antigen presentation by monocytes, dendritic cells, and/or B-cells. In one embodiment, polynucleotides, polypeptides, antibodies, and/or agonists or antagonists of the present invention enhance antigen presentation or antagonizes antigen presentation in vitro or in vivo. Moreover, in related embodiments, said enhancement or antagonism of antigen presentation may be useful as an anti-tumor treatment or to modulate the immune system.

[0559] In another specific embodiment, polypeptides, antibodies, polynucleotides and/or agonists or antagonists of the present invention are used as an agent to direct an individual's immune system towards development of a humoral response (i.e. TH2) as opposed to a TH1 cellular response.

[0560] In another specific embodiment, polypeptides, antibodies, polynucleotides and/or agonists or antagonists of the present invention are used as a means to induce tumor proliferation and thus make it more susceptible to anti-neoplastic agents. For example, multiple myeloma is a slowly dividing disease and is thus refractory to virtually all anti-neoplastic regimens. If these cells were forced to proliferate more rapidly their susceptibility profile would likely change.

[0561] In another specific embodiment, polypeptides, antibodies, polynucleotides and/or agonists or antagonists of the present invention are used as a stimulator of B cell production in pathologies such as AIDS, chronic lymphocyte disorder and/or Common Variable Immunodificiency.

[0562] In another specific embodiment, polypeptides, antibodies, polynucleotides and/or agonists or antagonists of the present invention are used as a therapy for generation and/or regeneration of lymphoid tissues following surgery, trauma or genetic defect. In another specific embodiment, polypeptides, antibodies, polynucleotides and/or agonists or antagonists of the present invention are used in the pretreatment of bone marrow samples prior to transplant.

[0563] In another specific embodiment, polypeptides, antibodies, polynucleotides and/or agonists or antagonists of the present invention are used as a gene-based therapy for genetically inherited disorders resulting in immuno-incompetence/immunodeficiency such as observed among SCID patients.

[0564] In another specific embodiment, polypeptides, antibodies, polynucleotides and/or agonists or antagonists of the present invention are used as a means of activating monocytes/macrophages to defend against parasitic diseases that effect monocytes such as Leishmania.

[0565] In another specific embodiment, polypeptides, antibodies, polynucleotides and/or agonists or antagonists of the present invention are used as a means of regulating secreted cytokines that are elicited by polypeptides of the invention.

[0566] In another embodiment, polypeptides, antibodies, polynucleotides and/or agonists or antagonists of the present invention are used in one or more of the applications decribed herein, as they may apply to veterinary medicine.

[0567] In another specific embodiment, polypeptides, antibodies, polynucleotides and/or agonists or antagonists of the present invention are used as a means of blocking various aspects of immune responses to foreign agents or self. Examples of diseases or conditions in which blocking of certain aspects of immune responses may be desired include autoimmune disorders such as lupus, and arthritis, as well as immunoresponsiveness to skin allergies, inflammation, bowel disease, injury and diseases/disorders associated with pathogens.

[0568] In another specific embodiment, polypeptides, antibodies, polynucleotides and/or agonists or antagonists of the present invention are used as a therapy for preventing the B cell proliferation and Ig secretion associated with autoimmune diseases such as idiopathic thrombocytopenic purpura, systemic lupus erythematosus and multiple sclerosis.

[0569] In another specific embodiment, polypeptides, antibodies, polynucleotides and/or agonists or antagonists of the present invention are used as a inhibitor of B and/or T cell migration in endothelial cells. This activity disrupts tissue architecture or cognate responses and is useful, for example in disrupting immune responses, and blocking sepsis.

[0570] In another specific embodiment, polypeptides, antibodies, polynucleotides and/or agonists or antagonists of the present invention are used as a therapy for chronic hypergammaglobulinemia evident in such diseases as monoclonal gammopathy of undetermined significance (MGUS), Waldenstrom's disease, related idiopathic monoclonal gammopathies, and plasmacytomas.

[0571] In another specific embodiment, polypeptides, antibodies, polynucleotides and/or agonists or antagonists of the present invention may be employed for instance to inhibit polypeptide chemotaxis and activation of macrophages and their precursors, and of neutrophils, basophils, B lymphocytes and some T-cell subsets, e.g., activated and CD8 cytotoxic T cells and natural killer cells, in certain autoimmune and chronic inflammatory and infective diseases. Examples of autoimmune diseases are described herein and include multiple sclerosis, and insulin-dependent diabetes.

[0572] The polypeptides, antibodies, polynucleotides and/or agonists or antagonists of the present invention may also be employed to treat idiopathic hyper-eosinophilic syndrome by, for example, preventing eosinophil production and migration.

[0573] In another specific embodiment, polypeptides, antibodies, polynucleotides and/or agonists or antagonists of the present invention are used to enhance or inhibit complement mediated cell lysis.

[0574] In another specific embodiment, polypeptides, antibodies, polynucleotides and/or agonists or antagonists of the present invention are used to enhance or inhibit antibody dependent cellular cytotoxicity.

[0575] In another specific embodiment, polypeptides, antibodies, polynucleotides and/or agonists or antagonists of the present invention may also be employed for treating atherosclerosis, for example, by preventing monocyte infiltration in the artery wall.

[0576] In another specific embodiment, polypeptides, antibodies, polynucleotides and/or agonists or antagonists of the present invention may be employed to treat adult respiratory distress syndrome (ARDS).

[0577] In another specific embodiment, polypeptides, antibodies, polynucleotides and/or agonists or antagonists of the present invention may be useful for stimulating wound and tissue repair, stimulating angiogenesis, and/or stimulating the repair of vascular or lymphatic diseases or disorders. Additionally, agonists and antagonists of the invention may be used to stimulate the regeneration of mucosal surfaces.

[0578] In a specific embodiment, polynucleotides or polypeptides, and/or agonists thereof are used to diagnose, prognose, treat, and/or prevent a disorder characterized by primary or acquired immunodeficiency, deficient serum immunoglobulin production, recurrent infections, and/or immune system dysfunction. Moreover, polynucleotides or polypeptides, and/or agonists thereof may be used to treat or prevent infections of the joints, bones, skin, and/or parotid glands, blood-borne infections (e.g., sepsis, meningitis, septic arthritis, and/or osteomyelitis), autoimmune diseases (e.g., those disclosed herein), inflammatory disorders, and malignancies, and/or any disease or disorder or condition associated with these infections, diseases, disorders and/or malignancies) including, but not limited to, CVID, other primary immune deficiencies, HIV disease, CLL, recurrent bronchitis, sinusitis, otitis media, conjunctivitis, pneumonia, hepatitis, meningitis, herpes zoster (e.g., severe herpes zoster), and/or pneumocystis carnii. Other diseases and disorders that may be prevented, diagnosed, prognosed, and/or treated with polynucleotides or polypeptides, and/or agonists of the present invention include, but are not limited to, HIV infection, HTLV-BLV infection, lymphopenia, phagocyte bactericidal dysfunction anemia, thrombocytopenia, and hemoglobinuria.

[0579] In another embodiment, polynucleotides, polypeptides, antibodies, and/or agonists or antagonists of the present invention are used to treat, and/or diagnose an individual having common variable immunodeficiency disease (“CVID”; also known as “acquired agammaglobulinemia” and “acquired hypogammaglobulinemia”) or a subset of this disease.

[0580] In a specific embodiment, polynucleotides, polypeptides, antibodies, and/or agonists or antagonists of the present invention may be used to diagnose, prognose, prevent, and/or treat cancers or neoplasms including immune cell or immune tissue-related cancers or neoplasms. Examples of cancers or neoplasms that may be prevented, diagnosed, or treated by polynucleotides, polypeptides, antibodies, and/or agonists or antagonists of the present invention include, but are not limited to, acute myelogenous leukemia, chronic myelogenous leukemia, Hodgkin's disease, non-Hodgkin's lymphoma, acute lymphocytic anemia (ALL) Chronic lymphocyte leukemia, plasmacytomas, multiple myeloma, Burkitt's lymphoma, EBV-transformed diseases, and/or diseases and disorders described in the section entitled “Hyperproliferative Disorders” elsewhere herein.

[0581] In another specific embodiment, polypeptides, antibodies, polynucleotides and/or agonists or antagonists of the present invention are used as a therapy for decreasing cellular proliferation of Large B-cell Lymphomas.

[0582] In another specific embodiment, polypeptides, antibodies, polynucleotides and/or agonists or antagonists of the present invention are used as a means of decreasing the involvement of B cells and Ig associated with Chronic Myelogenous Leukemia.

[0583] In specific embodiments, the compositions of the invention are used as an agent to boost immunoresponsiveness among B cell immunodeficient individuals, such as, for example, an individual who has undergone a partial or complete splenectomy.

[0584] Antagonists of the invention include, for example, binding and/or inhibitory antibodies, antisense nucleic acids, ribozymes or soluble forms of the polypeptides of the present invention (e.g., Fc fusion protein; see, e.g., Example 9). Agonists of the invention include, for example, binding or stimulatory antibodies, and soluble forms of the polypeptides (e.g., Fc fusion proteins; see, e.g., Example 9). Polypeptides, antibodies, polynucleotides and/or agonists or antagonists of the present invention may be employed in a composition with a pharmaceutically acceptable carrier, e.g., as described herein.

[0585] In another embodiment, polypeptides, antibodies, polynucleotides and/or agonists or antagonists of the present invention are administered to an animal (including, but not limited to, those listed above, and also including transgenic animals) incapable of producing functional endogenous antibody molecules or having an otherwise compromised endogenous immune system, but which is capable of producing human immunoglobulin molecules by means of a reconstituted or partially reconstituted immune system from another animal (see, e.g., published PCT Application Nos. WO98/24893, WO/9634096, WO/9633735, and WO/9110741). Administration of polypeptides, antibodies, polynucleotides and/or agonists or antagonists of the present invention to such animals is useful for the generation of monoclonal antibodies against the polypeptides, antibodies, polynucleotides and/or agonists or antagonists of the present invention.

[0586] Blood-Related Disorders

[0587] The polynucleotides, polypeptides, antibodies, and/or agonists or antagonists of the present invention may be used to modulate hemostatic (the stopping of bleeding) or thrombolytic (clot dissolving) activity. For example, by increasing hemostatic or thrombolytic activity, polynucleotides or polypeptides, and/or agonists or antagonists of the present invention could be used to treat or prevent blood coagulation diseases, disorders, and/or conditions (e.g., afibrinogenemia, factor deficiencies, hemophilia), blood platelet diseases, disorders, and/or conditions (e.g., thrombocytopenia), or wounds resulting from trauma, surgery, or other causes. Alternatively, polynucleotides, polypeptides, antibodies, and/or agonists or antagonists of the present invention that can decrease hemostatic or thrombolytic activity could be used to inhibit or dissolve clotting. These molecules could be important in the treatment or prevention of heart attacks (infarction), strokes, or scarring.

[0588] In specific embodiments, the polynucleotides, polypeptides, antibodies, and/or agonists or antagonists of the present invention may be used to prevent, diagnose, prognose, and/or treat thrombosis, arterial thrombosis, venous thrombosis, thromboembolism, pulmonary embolism, atherosclerosis, myocardial infarction, transient ischemic attack, unstable angina. In specific embodiments, the polynucleotides, polypeptides, antibodies, and/or agonists or antagonists of the present invention may be used for the prevention of occulsion of saphenous grafts, for reducing the risk of periprocedural thrombosis as might accompany angioplasty procedures, for reducing the risk of stroke in patients with atrial fibrillation including nonrheumatic atrial fibrillation, for reducing the risk of embolism associated with mechanical heart valves and or mitral valves disease. Other uses for the polynucleotides, polypeptides, antibodies, and/or agonists or antagonists of the present invention, include, but are not limited to, the prevention of occlusions in extrcorporeal devices (e.g., intravascular canulas, vascular access shunts in hemodialysis patients, hemodialysis machines, and cardiopulmonary bypass machines).

[0589] In another embodiment, a polypeptide of the invention, or polynucleotides, antibodies, agonists, or antagonists corresponding to that polypeptide, may be used to prevent, diagnose, prognose, and/or treat diseases and disorders of the blood and/or blood forming organs associated with the tissue(s) in which the polypeptide of the invention is expressed, including one, two, three, four, five, or more tissues disclosed in Table 1A, column 7 (Tissue Distribution Library Code).

[0590] The polynucleotides, polypeptides, antibodies, and/or agonists or antagonists of the present invention may be used to modulate hematopoietic activity (the formation of blood cells). For example, the polynucleotides, polypeptides, antibodies, and/or agonists or antagonists of the present invention may be used to increase the quantity of all or subsets of blood cells, such as, for example, erythrocytes, lymphocytes (B or T cells), myeloid cells (e.g., basophils, eosinophils, neutrophils, mast cells, macrophages) and platelets. The ability to decrease the quantity of blood cells or subsets of blood cells may be useful in the prevention, detection, diagnosis and/or treatment of anemias and leukopenias described below. Alternatively, the polynucleotides, polypeptides, antibodies, and/or agonists or antagonists of the present invention may be used to decrease the quantity of all or subsets of blood cells, such as, for example, erythrocytes, lymphocytes (B or T cells), myeloid cells (e.g., basophils, eosinophils, neutrophils, mast cells, macrophages) and platelets.. The ability to decrease the quantity of blood cells or subsets of blood cells may be useful in the prevention, detection, diagnosis and/or treatment of leukocytoses, such as, for example eosinophilia.

[0591] The polynucleotides, polypeptides, antibodies, and/or agonists or antagonists of the present invention may be used to prevent, treat, or diagnose blood dyscrasia.

[0592] Anemias are conditions in which the number of red blood cells or amount of hemoglobin (the protein that carries oxygen) in them is below normal. Anemia may be caused by excessive bleeding, decreased red blood cell production, or increased red blood cell destruction (hemolysis). The polynucleotides, polypeptides, antibodies, and/or agonists or antagonists of the present invention may be useful in treating, preventing, and/or diagnosing anemias. Anemias that may be treated prevented or diagnosed by the polynucleotides, polypeptides, antibodies, and/or agonists or antagonists of the present invention include iron deficiency anemia, hypochromic anemia, microcytic anemia, chlorosis, hereditary siderob;astic anemia, idiopathic acquired sideroblastic anemia, red cell aplasia, megaloblastic anemia (e.g., pernicious anemia, (vitamin B12 deficiency) and folic acid deficiency anemia), aplastic anemia, hemolytic anemias (e.g., autoimmune helolytic anemia, microangiopathic hemolytic anemia, and paroxysmal nocturnal hemoglobinuria). The polynucleotides, polypeptides, antibodies, and/or agonists or antagonists of the present invention may be useful in treating, preventing, and/or diagnosing anemias associated with diseases including but not limited to, anemias associated with systemic lupus erythematosus, cancers, lymphomas, chronic renal disease, and enlarged spleens. The polynucleotides, polypeptides, antibodies, and/or agonists or antagonists of the present invention may be useful in treating, preventing, and/or diagnosing anemias arising from drug treatments such as anemias associated with methyldopa, dapsone, and/or sulfadrugs. Additionally, rhe polynucleotides, polypeptides, antibodies, and/or agonists or antagonists of the present invention may be useful in treating, preventing, and/or diagnosing anemias associated with abnormal red blood cell architecture including but not limited to, hereditary spherocytosis, hereditary elliptocytosis, glucose-6-phosphate dehydrogenase deficiency, and sickle cell anemia.

[0593] The polynucleotides, polypeptides, antibodies, and/or agonists or antagonists of the present invention may be useful in treating, preventing, and/or diagnosing hemoglobin abnormalities, (e.g., those associated with sickle cell anemia, hemoglobin C disease, hemoglobin S-C disease, and hemoglobin E disease). Additionally, the polynucleotides, polypeptides, antibodies, and/or agonists or antagonists of the present invention may be useful in diagnosing, prognosing, preventing, and/or treating thalassemias, including, but not limited to major and minor forms of alpha-thalassemia and beta-thalassemia.

[0594] In another embodiment, the polynucleotides, polypeptides, antibodies, and/or agonists or antagonists of the present invention may be useful in diagnosing, prognosing, preventing, and/or treating bleeding disorders including, but not limited to, thrombocytopenia (e.g., idiopathic thrombocytopenic purpura, and thrombotic thrombocytopenic purpura), Von Willebrand's disease, hereditary platelet disorders (e.g., storage pool disease such as Chediak-Higashi and Hermansky-Pudlak syndromes, thromboxane A2 dysfunction, thromboasthenia, and Bernard-Soulier syndrome), hemolytic-uremic syndrome, hemophelias such as hemophelia A or Factor VII deficiency and Christmas disease or Factor IX deficiency, Hereditary Hemorhhagic Telangiectsia, also known as Rendu-Osler-Weber syndrome, allergic purpura (Henoch Schonlein purpura) and disseminated intravascular coagulation.

[0595] The effect of the polynucleotides, polypeptides, antibodies, and/or agonists or antagonists of the present invention on the clotting time of blood may be monitored using any of the clotting tests known in the art including, but not limited to, whole blood partial thromboplastin time (PTT), the activated partial thromboplastin time (aPTT), the activated clotting time (ACT), the recalcified activated clotting time, or the Lee-White Clotting time.

[0596] Several diseases and a variety of drugs can cause platelet dysfunction. Thus, in a specific embodiment, the polynucleotides, polypeptides, antibodies, and/or agonists or antagonists of the present invention may be useful in diagnosing, prognosing, preventing, and/or treating acquired platelet dysfunction such as platelet dysfunction accompanying kidney failure, leukemia, multiple myeloma, cirrhosis of the liver, and systemic lupus erythematosus as well as platelet dysfunction associated with drug treatments, including treatment with aspirin, ticlopidine, nonsteroidal anti-inflammatory drugs (used for arthritis, pain, and sprains), and penicillin in high doses.

[0597] In another embodiment, the polynucleotides, polypeptides, antibodies, and/or agonists or antagonists of the present invention may be useful in diagnosing, prognosing, preventing, and/or treating diseases and disorders characterized by or associated with increased or decreased numbers of white blood cells. Leukopenia occurs when the number of white blood cells decreases below normal. Leukopenias include, but are not limited to, neutropenia and lymphocytopenia. An increase in the number of white blood cells compared to normal is known as leukocytosis. The body generates increased numbers of white blood cells during infection. Thus, leukocytosis may simply be a normal physiological parameter that reflects infection. Alternatively, leukocytosis may be an indicator of injury or other disease such as cancer. Leokocytoses, include but are not limited to, eosinophilia, and accumulations of macrophages. In specific embodiments, the polynucleotides, polypeptides, antibodies, and/or agonists or antagonists of the present invention may be useful in diagnosing, prognosing, preventing, and/or treating leukopenia. In other specific embodiments, the polynucleotides, polypeptides, antibodies, and/or agonists or antagonists of the present invention may be useful in diagnosing, prognosing, preventing, and/or treating leukocytosis

[0598] Leukopenia may be a generalized decreased in all types of white blood cells, or may be a specific depletion of particular types of white blood cells. Thus, in specific embodiments, the polynucleotides, polypeptides, antibodies, and/or agonists or antagonists of the present invention may be useful in diagnosing, prognosing, preventing, and/or treating decreases in neutrophil numbers, known as neutropenia. Neutropenias that may be diagnosed, prognosed, prevented, and/or treated by the polynucleotides, polypeptides, antibodies, and/or agonists or antagonists of the present invention include, but are not limited to, infantile genetic agranulocytosis, familial neutropenia, cyclic neutropenia, neutropenias resulting from or associated with dietary deficiencies (e.g., vitamin B 12 deficiency or folic acid deficiency), neutropenias resulting from or associated with drug treatments (e.g., antibiotic regimens such as penicillin treatment, sulfonamide treatment, anticoagulant treatment, anticonvulsant drugs, anti-thyroid drugs, and cancer chemotherapy), and neutropenias resulting from increased neutrophil destruction that may occur in association with some bacterial or viral infections, allergic disorders, autoimmune diseases, conditions in which an individual has an enlarged spleen (e.g., Felty syndrome, malaria and sarcoidosis), and some drug treatment regimens.

[0599] The polynucleotides, polypeptides, antibodies, and/or agonists or antagonists of the present invention may be useful in diagnosing, prognosing, preventing, and/or treating lymphocytopenias (decreased numbers of B and/or T lymphocytes), including, but not limited lymphocytopenias resulting from or associated with stress, drug treatments (e.g., drug treatment with corticosteroids, cancer chemotherapies, and/or radiation therapies), AIDS infection and/or other diseases such as, for example, cancer, rheumatoid arthritis, systemic lupus erythematosus, chronic infections, some viral infections and/or hereditary disorders (e.g., DiGeorge syndrome, Wiskott-Aldrich Syndome, severe combined immunodeficiency, ataxia telangiectsia).

[0600] The polynucleotides, polypeptides, antibodies, and/or agonists or antagonists of the present invention may be useful in diagnosing, prognosing, preventing, and/or treating diseases and disorders associated with macrophage numbers and/or macrophage function including, but not limited to, Gaucher's disease, Niemann-Pick disease, Letterer-Siwe disease and Hand-Schuller-Christian disease.

[0601] In another embodiment, the polynucleotides, polypeptides, antibodies, and/or agonists or antagonists of the present invention may be useful in diagnosing, prognosing, preventing, and/or treating diseases and disorders associated with eosinophil numbers and/or eosinophil function including, but not limited to, idiopathic hypereosinophilic syndrome, eosinophilia-myalgia syndrome, and Hand-Schuller-Christian disease.

[0602] In yet another embodiment, the polynucleotides, polypeptides, antibodies, and/or agonists or antagonists of the present invention may be useful in diagnosing, prognosing, preventing, and/or treating leukemias and lymphomas including, but not limited to, acute lymphocytic (lymphpblastic) leukemia (ALL), acute myeloid (myelocytic, myelogenous, myeloblastic, or myelomonocytic) leukemia, chronic lymphocytic leukemia (e.g., B cell leukemias, T cell leukemias, Sezary syndrome, and Hairy cell leukenia), chronic myelocytic (myeloid, myelogenous, or granulocytic) leukemia, Hodgkin's lymphoma, non-hodgkin's lymphoma, Burkitt's lymphoma, and mycosis fungoides.

[0603] In other embodiments, the polynucleotides, polypeptides, antibodies, and/or agonists or antagonists of the present invention may be useful in diagnosing, prognosing, preventing, and/or treating diseases and disorders of plasma cells including, but not limited to, plasma cell dyscrasias, monoclonal gammaopathies, monoclonal gammopathies of undetermined significance, multiple myeloma, macroglobulinemia, Waldenstrom's macroglobulinemia, cryoglobulinemia, and Raynaud's phenomenon.

[0604] In other embodiments, the polynucleotides, polypeptides, antibodies, and/or agonists or antagonists of the present invention may be useful in treating, preventing, and/or diagnosing myeloproliferative disorders, including but not limited to, polycythemia vera, relative polycythemia, secondary polycythemia, myelofibrosis, acute myelofibrosis, agnogenic myelod metaplasia, thrombocythemia, (including both primary and seconday thrombocythemia) and chronic myelocytic leukemia.

[0605] In other embodiments, the polynucleotides, polypeptides, antibodies, and/or agonists or antagonists of the present invention may be useful as a treatment prior to surgery, to increase blood cell production.

[0606] In other embodiments, the polynucleotides, polypeptides, antibodies, and/or agonists or antagonists of the present invention may be useful as an agent to enhance the migration, phagocytosis, superoxide production, antibody dependent cellular cytotoxicity of neutrophils, eosionophils and macrophages.

[0607] In other embodiments, the polynucleotides, polypeptides, antibodies, and/or agonists or antagonists of the present invention may be useful as an agent to increase the number of stem cells in circulation prior to stem cells pheresis. In another specific embodiment, the polynucleotides, polypeptides, antibodies, and/or agonists or antagonists of the present invention may be useful as an agent to increase the number of stem cells in circulation prior to platelet pheresis.

[0608] In other embodiments, the polynucleotides, polypeptides, antibodies, and/or agonists or antagonists of the present invention may be useful as an agent to increase cytokine production.

[0609] In other embodiments, the polynucleotides, polypeptides, antibodies, and/or agonists or antagonists of the present invention may be useful in preventing, diagnosing, and/or treating primary hematopoietic disorders.

[0610] Hyperproliferative Disorders

[0611] Respiratory system associated polynucleotides or polypeptides, or agonists or antagonists thereof, can be used to treat, prevent, diagnose and/or prognose hyperproliferative diseases, disorders, and/or conditions, including neoplasms.

[0612] In a specific embodiment, respiratory system associated polynucleotides or polypeptides, or agonists or antagonists thereof, can be used to treat, prevent, and/or diagnose hyperproliferative diseases, disorders, and/or conditions of the respiratory system.

[0613] In a preferred embodiment, respiratory system associated polynucleotides or polypeptides, or agonists or antagonists thereof, can be used to treat, prevent, and/or diagnose respiratory system neoplasms.

[0614] Respiratory system associated polynucleotides or polypeptides, or agonists or antagonists of the invention, may inhibit the proliferation of the disorder through direct or indirect interactions. Alternatively, respiratory system associated polynucleotides or polypeptides, or agonists or antagonists thereof, may proliferate other cells, which can inhibit the hyperproliferative disorder.

[0615] For example, by increasing an immune response, particularly increasing antigenic qualities of the hyperproliferative disorder or by proliferating, differentiating, or mobilizing T-cells, hyperproliferative diseases, disorders, and/or conditions can be treated, prevented, and/or diagnosed. This immune response may be increased by either enhancing an existing immune response, or by initiating a new immune response. Alternatively, decreasing an immune response may also be a method of treating, preventing, and/or diagnosing hyperproliferative diseases, disorders, and/or conditions, such as a chemotherapeutic agent.

[0616] Examples of hyperproliferative diseases, disorders, and/or conditions that can be treated, prevented, and/or diagnosed by respiratory system associated polynucleotides or polypeptides, or agonists or antagonists thereof, include, but are not limited to neoplasms located in the: prostate, colon, abdomen, bone, breast, digestive system, liver, pancreas, peritoneum, endocrine glands (adrenal, parathyroid, pituitary, testicles, ovary, thymus, thyroid), eye, head and neck, nervous (central and peripheral), lymphatic system, pelvic, skin, soft tissue, spleen, thoracic, and urogenital.

[0617] Similarly, other hyperproliferative disorders can also be treated or detected by polynucleotides or polypeptides, or agonists or antagonists of the present invention. Examples of such hyperproliferative disorders include, but are not limited to: Acute Childhood Lymphoblastic Leukemia, Acute Lymphoblastic Leukemia, Acute Lymphocytic Leukemia, Acute Myeloid Leukemia, Adrenocortical Carcinoma, Adult (Primary) Hepatocellular Cancer, Adult (Primary) Liver Cancer, Adult Acute Lymphocytic Leukemia, Adult Acute Myeloid Leukemia, Adult Hodgkin's Disease, Adult Hodgkin's Lymphoma, Adult Lymphocytic Leukemia, Adult Non-Hodgkin's Lymphoma, Adult Primary Liver Cancer, Adult Soft Tissue Sarcoma, AIDS-Related Lymphoma, AIDS-Related Malignancies, Anal Cancer, Astrocytoma, Bile Duct Cancer, Bladder Cancer, Bone Cancer, Brain Stem Glioma, Brain Tumors, Breast Cancer, Cancer of the Renal Pelvis and Ureter, Central Nervous System (Primary) Lymphoma, Central Nervous System Lymphoma, Cerebellar Astrocytoma, Cerebral Astrocytoma, Cervical Cancer, Childhood (Primary) Hepatocellular Cancer, Childhood (Primary) Liver Cancer, Childhood Acute Lymphoblastic Leukemia, Childhood Acute Myeloid Leukemia, Childhood Brain Stem Glioma, Childhood Cerebellar Astrocytoma, Childhood Cerebral Astrocytoma, Childhood Extracranial Germ Cell Tumors, Childhood Hodgkin's Disease, Childhood Hodgkin's Lymphoma, Childhood Hypothalamic and Visual Pathway Glioma, Childhood Lymphoblastic Leukemia, Childhood Medulloblastoma, Childhood Non-Hodgkin's Lymphoma, Childhood Pineal and Supratentorial Primitive Neuroectodermal Tumors, Childhood Primary Liver Cancer, Childhood Rhabdomyosarcoma, Childhood Soft Tissue Sarcoma, Childhood Visual Pathway and Hypothalamic Glioma, Chronic Lymphocytic Leukemia, Chronic Myelogenous Leukemia, Colon Cancer, Cutaneous T-Cell Lymphoma, Endocrine Pancreas Islet Cell Carcinoma, Endometrial Cancer, Ependymoma, Epithelial Cancer, Esophageal Cancer, Ewing's Sarcoma and Related Tumors, Exocrine Pancreatic Cancer, Extracranial Germ Cell Tumor, Extragonadal Germ Cell Tumor, Extrahepatic Bile Duct Cancer, Eye Cancer, Female Breast Cancer, Gaucher's Disease, Gallbladder Cancer, Gastric Cancer, Gastrointestinal Carcinoid Tumor, Gastrointestinal Tumors, Germ Cell Tumors, Gestational Trophoblastic Tumor, Hairy Cell Leukemia, Head and Neck Cancer, Hepatocellular Cancer, Hodgkin's Disease, Hodgkin's Lymphoma, Hypergammaglobulinemia, Hypopharyngeal Cancer, Intestinal Cancers, Intraocular Melanoma, Islet Cell Carcinoma, Islet Cell Pancreatic Cancer, Kaposi's Sarcoma, Kidney Cancer, Laryngeal Cancer, Lip and Oral Cavity Cancer, Liver Cancer, Lung Cancer, Lymphoproliferative Disorders, Macroglobulinemia, Male Breast Cancer, Malignant Mesothelioma, Malignant Thymoma, Medulloblastoma, Melanoma, Mesothelioma, Metastatic Occult Primary Squamous Neck Cancer, Metastatic Primary Squamous Neck Cancer, Metastatic Squamous Neck Cancer, Multiple Myeloma, Multiple Myeloma/Plasma Cell Neoplasm, Myelodysplastic Syndrome, Myelogenous Leukemia, Myeloid Leukemia, Myeloproliferative Disorders, Nasal Cavity and Paranasal Sinus Cancer, Nasopharyngeal Cancer, Neuroblastoma, Non-Hodgkin's Lymphoma During Pregnancy, Nonmelanoma Skin Cancer, Non-Small Cell Lung Cancer, Occult Primary Metastatic Squamous Neck Cancer, Oropharyngeal Cancer, Osteo-/Malignant Fibrous Sarcoma, Osteosarcoma/Malignant Fibrous Histiocytoma, Osteosarcoma/Malignant Fibrous Histiocytoma of Bone, Ovarian Epithelial Cancer, Ovarian Germ Cell Tumor, Ovarian Low Malignant Potential Tumor, Pancreatic Cancer, Paraproteinemias, Purpura, Parathyroid Cancer, Penile Cancer, Pheochromocytoma, Pituitary Tumor, Plasma Cell Neoplasm/Multiple Myeloma, Primary Central Nervous System Lymphoma, Primary Liver Cancer, Prostate Cancer, Rectal Cancer, Renal Cell Cancer, Renal Pelvis and Ureter Cancer, Retinoblastoma, Rhabdomyosarcoma, Salivary Gland Cancer, Sarcoidosis Sarcomas, Sezary Syndrome, Skin Cancer, Small Cell Lung Cancer, Small Intestine Cancer, Soft Tissue Sarcoma, Squamous Neck Cancer, Stomach Cancer, Supratentorial Primitive Neuroectodermal and Pineal Tumors, T-Cell Lymphoma, Testicular Cancer, Thymoma, Thyroid Cancer, Transitional Cell Cancer of the Renal Pelvis and Ureter, Transitional Renal Pelvis and Ureter Cancer, Trophoblastic Tumors, Ureter and Renal Pelvis Cell Cancer, Urethral Cancer, Uterine Cancer, Uterine Sarcoma, Vaginal Cancer, Visual Pathway and Hypothalamic Glioma, Vulvar Cancer, Waldenstrom's Macroglobulinemia, Wilms'Tumor, and any other hyperproliferative disease, besides neoplasia, located in an organ system listed above.

[0618] In another preferred embodiment, polynucleotides or polypeptides, or agonists or antagonists of the present invention are used to diagnose, prognose, prevent, and/or treat premalignant conditions and to prevent progression to a neoplastic or malignant state, including but not limited to those disorders described above. Such uses are indicated in conditions known or suspected of preceding progression to neoplasia or cancer, in particular, where non-neoplastic cell growth consisting of hyperplasia, metaplasia, or most particularly, dysplasia has occurred (for review of such abnormal growth conditions, see Robbins and Angell, 1976, Basic Pathology, 2d Ed., W. B. Saunders Co., Philadelphia, pp. 68-79.)

[0619] Hyperplasia is a form of controlled cell proliferation, involving an increase in cell number in a tissue or organ, without significant alteration in structure or function. Hyperplastic disorders which can be diagnosed, prognosed, prevented, and/or treated with compositions of the invention (including polynucleotides, polypeptides, agonists or antagonists) include, but are not limited to, angiofollicular mediastinal lymph node hyperplasia, angiolymphoid hyperplasia with eosinophilia, atypical melanocytic hyperplasia, basal cell hyperplasia, benign giant lymph node hyperplasia, cementum hyperplasia, congenital adrenal hyperplasia, congenital sebaceous hyperplasia, cystic hyperplasia, cystic hyperplasia of the breast, denture hyperplasia, ductal hyperplasia, endometrial hyperplasia, fibromuscular hyperplasia, focal epithelial hyperplasia, gingival hyperplasia, inflammatory fibrous hyperplasia, inflammatory papillary hyperplasia, intravascular papillary endothelial hyperplasia, nodular hyperplasia of prostate, nodular regenerative hyperplasia, pseudoepitheliomatous hyperplasia, senile sebaceous hyperplasia, and verrucous hyperplasia.

[0620] Metaplasia is a form of controlled cell growth in which one type of adult or fully differentiated cell substitutes for another type of adult cell. Metaplastic disorders which can be diagnosed, prognosed, prevented, and/or treated with compositions of the invention (including polynucleotides, polypeptides, agonists or antagonists) include, but are not limited to, agnogenic myeloid metaplasia, apocrine metaplasia, atypical metaplasia, autoparenchymatous metaplasia, connective tissue metaplasia, epithelial metaplasia, intestinal metaplasia, metaplastic anemia, metaplastic ossification, metaplastic polyps, myeloid metaplasia, primary myeloid metaplasia, secondary myeloid metaplasia, squamous metaplasia, squamous metaplasia of amnion, and symptomatic myeloid metaplasia.

[0621] Dysplasia is frequently a forerunner of cancer, and is found mainly in the epithelia; it is the most disorderly form of non-neoplastic cell growth, involving a loss in individual cell uniformity and in the architectural orientation of cells. Dysplastic cells often have abnormally large, deeply stained nuclei, and exhibit pleomorphism. Dysplasia characteristically occurs where there exists chronic irritation or inflammation. Dysplastic disorders which can be diagnosed, prognosed, prevented, and/or treated with compositions of the invention (including polynucleotides, polypeptides, agonists or antagonists) include, but are not limited to, anhidrotic ectodermal dysplasia, anterofacial dysplasia, asphyxiating thoracic dysplasia, atriodigital dysplasia, bronchopulmonary dysplasia, cerebral dysplasia, cervical dysplasia, chondroectodermal dysplasia, cleidocranial dysplasia, congenital ectodermal dysplasia, craniodiaphysial dysplasia, craniocarpotarsal dysplasia, craniometaphysial dysplasia, dentin dysplasia, diaphysial dysplasia, ectodermal dysplasia, enamel dysplasia, encephalo-ophthalmic dysplasia, dysplasia epiphysialis hemimelia, dysplasia epiphysialis multiplex, dysplasia epiphysialis punctata, epithelial dysplasia, faciodigitogenital dysplasia, familial fibrous dysplasia of jaws, familial white folded dysplasia, fibromuscular dysplasia, fibrous dysplasia of bone, florid osseous dysplasia, hereditary renal-retinal dysplasia, hidrotic ectodermal dysplasia, hypohidrotic ectodermal dysplasia, lymphopenic thymic dysplasia, mammary dysplasia, mandibulofacial dysplasia, metaphysial dysplasia, Mondini dysplasia, monostotic fibrous dysplasia, mucoepithelial dysplasia, multiple epiphysial dysplasia, oculoauriculovertebral dysplasia, oculodentodigital dysplasia, oculovertebral dysplasia, odontogenic dysplasia, ophthalmomandibulomelic dysplasia, periapical cemental dysplasia, polyostotic fibrous dysplasia, pseudoachondroplastic spondyloepiphysial dysplasia, retinal dysplasia, septo-optic dysplasia, spondyloepiphysial dysplasia, and ventriculoradial dysplasia.

[0622] Additional pre-neoplastic disorders which can be diagnosed, prognosed, prevented, and/or treated with compositions of the invention (including polynucleotides, polypeptides, agonists or antagonists) include, but are not limited to, benign dysproliferative disorders (e.g., benign tumors, fibrocystic conditions, tissue hypertrophy, intestinal polyps, colon polyps, and esophageal dysplasia), leukoplakia, keratoses, Bowen's disease, Farmer's Skin, solar cheilitis, and solar keratosis.

[0623] In another embodiment, a polypeptide of the invention, or polynucleotides, antibodies, agonists, or antagonists corresponding to that polypeptide, may be used to diagnose and/or prognose disorders associated with the tissue(s) in which the polypeptide of the invention is expressed, including one, two, three, four, five, or more tissues disclosed in Table 1A, 7 (Tissue Distribution Library Code).

[0624] In another embodiment, polynucleotides, polypeptides, antibodies, and/or agonists or antagonists of the present invention conjugated to a toxin or a radioactive isotope, as described herein, may be used to treat cancers and neoplasms, including, but not limited to those described herein. In a further preferred embodiment, polynucleotides, polypeptides, antibodies, and/or agonists or antagonists of the present invention conjugated to a toxin or a radioactive isotope, as described herein, may be used to treat acute myelogenous leukemia.

[0625] Additionally, polynucleotides, polypeptides, and/or agonists or antagonists of the invention may affect apoptosis, and therefore, would be useful in treating a number of diseases associated with increased cell survival or the inhibition of apoptosis. For example, diseases associated with increased cell survival or the inhibition of apoptosis that could be diagnosed, prognosed, prevented, and/or treated by polynucleotides, polypeptides, and/or agonists or antagonists of the invention, include cancers (such as follicular lymphomas, carcinomas with p53 mutations, and hormone-dependent tumors, including, but not limited to colon cancer, cardiac tumors, pancreatic cancer, melanoma, retinoblastoma, glioblastoma, lung cancer, intestinal cancer, testicular cancer, stomach cancer, neuroblastoma, myxoma, myoma, lymphoma, endothelioma, osteoblastoma, osteoclastoma, osteosarcoma, chondrosarcoma, adenoma, breast cancer, prostate cancer, Kaposi's sarcoma and ovarian cancer); autoimmune disorders such as, multiple sclerosis, Sjogren's syndrome, Hashimoto's thyroiditis, biliary cirrhosis, Behcet's disease, Crohn's disease, polymyositis, systemic lupus erythematosus and immune-related glomerulonephritis and rheumatoid arthritis) and viral infections (such as herpes viruses, pox viruses and adenoviruses), inflammation, graft v. host disease, acute graft rejection, and chronic graft rejection.

[0626] In preferred embodiments, polynucleotides, polypeptides, and/or agonists or antagonists of the invention are used to inhibit growth, progression, and/or metastasis of cancers, in particular those listed above.

[0627] Additional diseases or conditions associated with increased cell survival that could be diagnosed, prognosed, prevented, and/or treated by polynucleotides, polypeptides, and/or agonists or antagonists of the invention, include, but are not limited to, progression, and/or metastases of malignancies and related disorders such as leukemia (including acute leukemias (e.g., acute lymphocytic leukemia, acute myelocytic leukemia (including myeloblastic, promyelocytic, myelomonocytic, monocytic, and erythroleukemia)) and chronic leukemias (e.g., chronic myelocytic (granulocytic) leukemia and chronic lymphocytic leukemia)), polycythemia vera, lymphomas (e.g., Hodgkin's disease and non-Hodgkin's disease), multiple myeloma, Waldenstrom's macroglobulinemia, heavy chain disease, and solid tumors including, but not limited to, sarcomas and carcinomas such as fibrosarcoma, myxosarcoma, liposarcoma, chondrosarcoma, osteogenic sarcoma, chordoma, angiosarcoma, endotheliosarcoma, lymphangiosarcoma, lymphangioendotheliosarcoma, synovioma, mesothelioma, Ewing's tumor, leiomyosarcoma, rhabdomyosarcoma, colon carcinoma, pancreatic cancer, breast cancer, ovarian cancer, prostate cancer, squamous cell carcinoma, basal cell carcinoma, adenocarcinoma, sweat gland carcinoma, sebaceous gland carcinoma, papillary carcinoma, papillary adenocarcinomas, cystadenocarcinoma, medullary carcinoma, bronchogenic carcinoma, renal cell carcinoma, hepatoma, bile duct carcinoma, choriocarcinoma, seminoma, embryonal carcinoma, Wilm's tumor, cervical cancer, testicular tumor, lung carcinoma, small cell lung carcinoma, bladder carcinoma, epithelial carcinoma, glioma, astrocytoma, medulloblastoma, craniopharyngioma, ependymoma, pinealoma, emangioblastoma, acoustic neuroma, oligodendroglioma, menangioma, melanoma, neuroblastoma, and retinoblastoma.

[0628] Diseases associated with increased apoptosis that could be diagnosed, prognosed, prevented, and/or treated by polynucleotides, polypeptides, and/or agonists or antagonists of the invention, include AIDS; neurodegenerative disorders (such as Alzheimer's disease, Parkinson's disease, amyotrophic lateral sclerosis, retinitis pigmentosa, cerebellar degeneration and brain tumor or prior associated disease); autoimmune disorders (such as, multiple sclerosis, Sjogren's syndrome, Hashimoto's thyroiditis, biliary cirrhosis, Behcet's disease, Crohn's disease, polymyositis, systemic lupus erythematosus and immune-related glomerulonephritis and rheumatoid arthritis) myelodysplastic syndromes (such as aplastic anemia), graft v. host disease, ischemic injury (such as that caused by myocardial infarction, stroke and reperfusion injury), liver injury (e.g., hepatitis related liver injury, ischemia/reperfusion injury, cholestosis (bile duct injury) and liver cancer); toxin-induced liver disease (such as that caused by alcohol), septic shock, cachexia and anorexia.

[0629] Hyperproliferative diseases and/or disorders that could be diagnosed, prognosed, prevented, and/or treated by polynucleotides, polypeptides, and/or agonists or antagonists of the invention, include, but are not limited to, neoplasms located in the liver, abdomen, bone, breast, digestive system, pancreas, peritoneum, endocrine glands (adrenal, parathyroid, pituitary, testicles, ovary, thymus, thyroid), eye, head and neck, nervous system (central and peripheral), lymphatic system, pelvis, skin, soft tissue, spleen, thorax, and urogenital tract.

[0630] Similarly, other hyperproliferative disorders can also be diagnosed, prognosed, prevented, and/or treated by polynucleotides, polypeptides, and/or agonists or antagonists of the invention. Examples of such hyperproliferative disorders include, but are not limited to: hypergammaglobulinemia, lymphoproliferative disorders, paraproteinemias, purpura, sarcoidosis, Sezary Syndrome, Waldenstron's macroglobulinemia, Gaucher's Disease, histiocytosis, and any other hyperproliferative disease, besides neoplasia, located in an organ system listed above.

[0631] One preferred embodiment utilizes polynucleotides of the present invention to inhibit aberrant cellular division, by gene therapy using the present invention, and/or protein fusions or fragments thereof.

[0632] Thus, the present invention provides a method for treating cell proliferative diseases, disorders, and/or conditions by inserting into an abnormally proliferating cell a polynucleotide of the present invention, wherein said polynucleotide represses said cell proliferation, disease, disorder, and/or condition.

[0633] In a preferred embodiment, the present invention provides a method for treating cell proliferative diseases, disorders and/or conditions of the respiratory system by inserting into a cell, a polynucleotide of the present invention, wherein said polynucleotide represses said cell proliferation, disease and/or disorder.

[0634] Another embodiment of the present invention provides a method of treating cell-proliferative diseases, disorders, and/or conditions in individuals comprising administration of one or more active gene copies of the present invention to an abnormally proliferating cell or cells. In a preferred embodiment, polynucleotides of the present invention is a DNA construct comprising a recombinant expression vector effective in expressing a DNA sequence encoding said polynucleotides. In another preferred embodiment of the present invention, the DNA construct encoding the polynucleotides of the present invention is inserted into cells to be treated utilizing a retrovirus, or more preferably an adenoviral vector (see, e.g., G J. Nabel, et. al., PNAS 96: 324-326 (1999), which is hereby incorporated by reference). In a most preferred embodiment, the viral vector is defective and will not transform non-proliferating cells, only proliferating cells. Moreover, in a preferred embodiment, the polynucleotides of the present invention inserted into proliferating cells either alone, or in combination with or fused to other polynucleotides, can then be modulated via an external stimulus (i.e., magnetic, specific small molecule, chemical, or drug administration, etc.), which acts upon the promoter upstream of said polynucleotides to induce expression of the encoded protein product. As such the beneficial therapeutic affect of the present invention may be expressly modulated (i.e., to increase, decrease, or inhibit expression of the present invention) based upon said external stimulus.

[0635] Polynucleotides of the present invention may be useful in repressing expression of oncogenic genes or antigens. By “repressing expression of the oncogenic genes” is intended the suppression of the transcription of the gene, the degradation of the gene transcript (pre-message RNA), the inhibition of splicing, the destruction of the messenger RNA, the prevention of the post-translational modifications of the protein, the destruction of the protein, or the inhibition of the normal function of the protein.

[0636] For local administration to abnormally proliferating cells, polynucleotides of the present invention may be administered by any method known to those of skill in the art including, but not limited to transfection, electroporation, microinjection of cells, or in vehicles such as liposomes, lipofectin, or as naked polynucleotides, or any other method described throughout the specification. The polynucleotide of the present invention may be delivered by known gene delivery systems such as, but not limited to, retroviral vectors (Gilboa, J. Virology 44:845 (1982); Hocke, Nature 320:275 (1986); Wilson, et al., Proc. Natl. Acad. Sci. U.S.A. 85:3014), vaccinia virus system (Chakrabarty et al., Mol. Cell Biol. 05:3403 (1985) or other efficient DNA delivery systems (Yates et al., Nature 313:812 (1985)) known to those skilled in the art. These references are exemplary only and are hereby incorporated by reference. In order to specifically deliver or transfect cells which are abnormally proliferating and spare non-dividing cells, it is preferable to utilize a retrovirus, or adenoviral (as described in the art and elsewhere herein) delivery system known to those of skill in the art. Since host DNA replication is required for retroviral DNA to integrate and the retrovirus will be unable to self replicate due to the lack of the retrovirus genes needed for its life cycle. Utilizing such a retroviral delivery system for polynucleotides of the present invention will target said gene and constructs to abnormally proliferating cells and will spare the non-dividing normal cells.

[0637] The polynucleotides of the present invention may be delivered directly to cell proliferative disorder/disease sites in internal organs, body cavities and the like by use of imaging devices used to guide an injecting needle directly to the disease site. The polynucleotides of the present invention may also be administered to disease sites at the time of surgical intervention.

[0638] By “cell proliferative disease” is meant any human or animal disease or disorder, affecting any one or any combination of organs, cavities, or body parts, which is characterized by single or multiple local abnormal proliferations of cells, groups of cells, or tissues, whether benign or malignant.

[0639] Any amount of the polynucleotides of the present invention may be administered as long as it has a biologically inhibiting effect on the proliferation of the treated cells. Moreover, it is possible to administer more than one of the polynucleotide of the present invention simultaneously to the same site. By “biologically inhibiting” is meant partial or total growth inhibition as well as decreases in the rate of proliferation or growth of the cells. The biologically inhibitory dose may be determined by assessing the effects of the polynucleotides of the present invention on target malignant or abnormally proliferating cell growth in tissue culture, tumor growth in animals and cell cultures, or any other method known to one of ordinary skill in the art.

[0640] The present invention is further directed to antibody-based therapies which involve administering of anti-polypeptides and anti-polynucleotide antibodies to a mammalian, preferably human, patient for treating one or more of the described diseases, disorders, and/or conditions. Methods for producing anti-polypeptides and anti-polynucleotide antibodies polyclonal and monoclonal antibodies are described in detail elsewhere herein. Such antibodies may be provided in pharmaceutically acceptable compositions as known in the art or as described herein.

[0641] A summary of the ways in which the antibodies of the present invention may be used therapeutically includes binding polynucleotides or polypeptides of the present invention locally or systemically in the body or by direct cytotoxicity of the antibody, e.g., as mediated by complement (CDC) or by effector cells (ADCC). Some of these approaches are described in more detail below. Armed with the teachings provided herein, one of ordinary skill in the art will know how to use the antibodies of the present invention for diagnostic, monitoring or therapeutic purposes without undue experimentation.

[0642] In particular, the antibodies, fragments and derivatives of the present invention are useful for treating a subject having or developing cell proliferative and/or differentiation diseases, disorders, and/or conditions as described herein. Such treatment comprises administering a single or multiple doses of the antibody, or a fragment, derivative, or a conjugate thereof.

[0643] The antibodies of this invention may be advantageously utilized in combination with other monoclonal or chimeric antibodies, or with lymphokines or hematopoietic growth factors, for example, which serve to increase the number or activity of effector cells which interact with the antibodies.

[0644] It is preferred to use high affinity and/or potent in vivo inhibiting and/or neutralizing antibodies against polypeptides or polynucleotides of the present invention, fragments or regions thereof, for both immunoassays directed to and therapy of diseases, disorders, and/or conditions related to polynucleotides or polypeptides, including fragments thereof, of the present invention. Such antibodies, fragments, or regions, will preferably have an affinity for polynucleotides or polypeptides, including fragments thereof. Preferred binding affinities include those with a dissociation constant or Kd less than 5×10⁻⁶M, 10⁻⁶M, 5×10⁻⁷M, 10⁻⁷M, 5×10⁻⁸M, 10⁻⁸M, 5×10⁻⁹M, 10⁻⁹M, 5×10⁻¹⁰M, 10⁻¹⁰M, 5×10⁻¹¹M, 10⁻¹¹M, 5×10⁻¹²M, 10⁻¹²M, 5×10⁻¹³M, 10⁻¹³M, 5×10⁻¹⁴M, 10⁻¹⁴M, 5×10⁻¹⁵M, and 10⁻¹⁵M.

[0645] Moreover, respiratory system antigen polypeptides of the present invention or fragments thereof, are useful in inhibiting the angiogenesis of proliferative cells or tissues, either alone, as a protein fusion, or in combination with other polypeptides directly or indirectly, as described elsewhere herein. In a most preferred embodiment, said anti-angiogenesis effect may be achieved indirectly, for example, through the inhibition of hematopoietic, tumor-specific cells, such as tumor-associated macrophages (see, e.g., Joseph I B, et al. J Natl Cancer Inst, 90(21):1648-53 (1998), which is hereby incorporated by reference). Antibodies directed to polypeptides or polynucleotides of the present invention may also result in inhibition of angiogenesis directly, or indirectly (see, e.g., Witte L, et al., Cancer Metastasis Rev. 17(2):155-61 (1998), which is hereby incorporated by reference)).

[0646] Polypeptides, including protein fusions, of the present invention, or fragments thereof may be useful in inhibiting proliferative cells or tissues through the induction of apoptosis. Said polypeptides may act either directly, or indirectly to induce apoptosis of proliferative cells and tissues, for example in the activation of a death-domain receptor, such as tumor necrosis factor (TNF) receptor-1, CD95 (Fas/APO-1), TNF-receptor-related apoptosis-mediated protein (TRAMP) and TNF-related apoptosis-inducing ligand (TRAIL) receptor-1 and -2 (see, e.g., Schulze-Osthoff K, et.al., Eur J Biochem 254(3):439-59 (1998), which is hereby incorporated by reference). Moreover, in another preferred embodiment of the present invention, said polypeptides may induce apoptosis through other mechanisms, such as in the activation of other proteins which will activate apoptosis, or through stimulating the expression of said proteins, either alone or in combination with small molecule drugs or adjuvants, such as apoptonin, galectins, thioredoxins, antiinflammatory proteins (See for example, Mutat. Res. 400(1-2):447-55 (1998), Med Hypotheses.50(5):423-33 (1998), Chem. Biol. Interact. Apr 24;1 11-112:23-34 (1998), J. Mo. Med. 76(6):402-12 (1998), Int. J. Tissue React. 20(1):3-15 (1998), which are all hereby incorporated by reference).

[0647] Polypeptides, including protein fusions to, or fragments thereof, of the present invention are useful in inhibiting the metastasis of proliferative cells or tissues. Inhibition may occur as a direct result of administering polypeptides, or antibodies directed to said polypeptides as described elsewhere herein, or indirectly, such as activating the expression of proteins known to inhibit metastasis, for example alpha 4 integrins, (See, e.g., Curr Top Microbiol Immunol 1998;231:125-41, which is hereby incorporated by reference). Such therapeutic affects of the present invention may be achieved either alone, or in combination with small molecule drugs or adjuvants.

[0648] In another embodiment, the invention provides a method of delivering compositions containing the polypeptides of the invention (e.g., compositions containing polypeptides or anti-respiratory system antigen polypeptide antibodies associated with heterologous polypeptides, heterologous nucleic acids, toxins, or prodrugs) to targeted cells expressing the polypeptide of the present invention. Respiratory system antigen polypeptides or anti-respiratory system antigen polypeptide antibodies of the invention may be associated with heterologous polypeptides, heterologous nucleic acids, toxins, or prodrugs via hydrophobic, hydrophilic, ionic and/or covalent interactions.

[0649] Polypeptides, protein fusions to, or fragments thereof, of the present invention are useful in enhancing the immunogenicity and/or antigenicity of proliferating cells or tissues, either directly, such as would occur if the polypeptides of the present invention ‘vaccinated’ the immune response to respond to proliferative antigens and immunogens, or indirectly, such as in activating the expression of proteins known to enhance the immune response (e.g. chemokines), to said antigens and immunogens.

[0650] Urinary System Disorders

[0651] Polynucleotides, polypeptides, antibodies, and/or agonists or antagonists of the present invention, may be used to treat, prevent, diagnose, and/or prognose disorders of the urinary system, including but not limited to disorders of the renal system, bladder, ureters, and urethra. Renal disorders include, but are not limited to, kidney failure, nephritis, blood vessel disorders of kidney, metabolic and congenital kidney disorders, urinary disorders of the kidney, autoimmune disorders, sclerosis and necrosis, electrolyte imbalance, and kidney cancers.

[0652] Kidney failure diseases include, but are not limited to, acute kidney failure, chronic kidney failure, atheroembolic renal failure, and end-stage renal disease. Inflammatory diseases of the kidney include acute glomerulonephritis, postinfectious glomerulonephritis, rapidly progressive glomerulonephritis, nephrotic syndrome, membranous glomerulonephritis, familial nephrotic syndrome, membranoproliferative glomerulonephritis I and II, mesangial proliferative glomerulonephritis, chronic glomerulonephritis, acute tubulointerstitial nephritis, chronic tubulointerstitial nephritis, acute post-streptococcal glomerulonephritis (PSGN), pyelonephritis, lupus nephritis, chronic nephritis, interstitial nephritis, and post-streptococcal glomerulonephritis.

[0653] Blood vessel disorders of the kidneys include, but are not limited to, kidney infarction, atheroembolic kidney disease, cortical necrosis, malignant nephrosclerosis, renal vein thrombosis, renal underperfusion, renal ischemia-reperfusion, renal artery embolism, and renal artery stenosis. Kidney disorders resulting form urinary tract problems include, but are not limited to, pyelonephritis, hydronephrosis, urolithiasis (renal lithiasis, nephrolithiasis), reflux nephropathy, urinary tract infections, urinary retention, and acute or chronic unilateral obstructive uropathy.

[0654] Metabolic and congenital disorders of the kidneys include, but are not limited to, renal tubular acidosis, renal glycosuria, nephrogenic diabetes insipidus, cystinuria, Fanconi's syndrome, vitamin D-resistant rickets, Hartnup disease, Bartter's syndrome, Liddle's syndrome, polycystic kidney disease, medullary cystic disease, medullary sponge kidney, Alport's syndrome, nail-patella syndrome, congenital nephrotic syndrome, CRUSH syndrome, horseshoe kidney, diabetic nephropathy, nephrogenic diabetes insipidus, analgesic nephropathy, kidney stones, and membranous nephropathy, Kidney disorders resulting from an autoimmune response include, but are not limited to, systemic lupus erythematosus (SLE), Goodpasture syndrome, IgA nephropathy, and IgM mesangial proliferative glomerulonephritis.

[0655] Sclerotic or necrotic disorders of the kidney include, but are not limited to, glomerulosclerosis, diabetic nephropathy, focal segmental glomerulosclerosis (FSGS), necrotizing glomerulonephritis, and renal papillary necrosis. Kidneys may also develop carcinomas, including, but not limited to, hypernephroma, nephroblastoma, renal cell cancer, transitional cell cancer, squamous cell cancer, and Wilm's tumor.

[0656] Kidney disorders may also result in electrolyte imbalances, including, but not limited to, nephrocalcinosis, pyuria, edema, hydronephritis, proteinuria, hyponatremia, hypernatremia, hypokalemia, hyperkalemia, hypocalcemia, hypercalcemia, hypophosphatemia, and hyperphosphatemia.

[0657] Bladder disorders include, but are not limited to, benign prostatic hyperplasia (BPH), interstitial cystitis (IC), prostatitis, proteinuria, urinary tract infections, urinary incontinence, urinary retention. Disorders of the ureters and urethra include, but are not limited to, acute or chronic unilateral obstructive uropathy. The bladder, ureters, and urethra may also develop carcinomas, including, but not limited to, superficial bladder canccer, invasive bladder cancer, carcinoma of the ureter, and urethra cancers.

[0658] Polypeptides may be administered using any method known in the art, including, but not limited to, direct needle injection at the delivery site, intravenous injection, topical administration, catheter infusion, biolistic injectors, particle accelerators, gelfoam sponge depots, other commercially available depot materials, osmotic pumps, oral or suppositorial solid pharmaceutical formulations, decanting or topical applications during surgery, aerosol delivery. Such methods are known in the art. Polypeptides may be administered as part of a Therapeutic, described in more detail below. Methods of delivering polynucleotides are described in more detail herein.

[0659] Cardiovascular Disorders

[0660] Polynucleotides or polypeptides, or agonists or antagonists of the present invention, may be used to treat, prevent, diagnose, and/or prognose cardiovascular disorders, including, but not limited to, peripheral artery disease, such as limb ischemia.

[0661] Cardiovascular disorders include cardiovascular abnormalities, such as arterio-arterial fistula, arteriovenous fistula, cerebral arteriovenous malformations, congenital heart defects, pulmonary atresia, and Scimitar Syndrome. Congenital heart defects include aortic coarctation, cor triatriatum, coronary vessel anomalies, crisscross heart, dextrocardia, patent ductus arteriosus, Ebstein's anomaly, Eisenmenger complex, hypoplastic left heart syndrome, levocardia, tetralogy of fallot, transposition of great vessels, double outlet right ventricle, tricuspid atresia, persistent truncus arteriosus, total anomalous pulmonary venous connection, hypoplastic left heart syndrome, and heart septal defects, such as aortopulmonary septal defect, endocardial cushion defects, Lutembacher's Syndrome, atrioventricular canal defect, trilogy of Fallot, ventricular heart septal defects.

[0662] Cardiovascular disorders also include heart disease, such as arrhythmias, carcinoid heart disease, high cardiac output, low cardiac output, cardiac tamponade, endocarditis (including bacterial), heart aneurysm, cardiac arrest, sudden cardiac death, congestive heart failure, congestive cardiomyopathy, paroxysmal dyspnea, cardiac edema, heart hypertrophy, congestive cardiomyopathy, left ventricular hypertrophy, right ventricular hypertrophy, post-infarction heart rupture, ventricular septal rupture, heart valve diseases, myocardial diseases, myocardial ischemia, pericardial effusion, pericarditis (including constrictive and tuberculous), pneumopericardium, postpericardiotomy syndrome, pulmonary heart disease, rheumatic heart disease, ventricular dysfunction, hyperemia, cardiovascular pregnancy complications, Scimitar Syndrome, diastolic dysfunction, enlarged heart, heart block, J-curve phenomenon, rheumatic heart disease, Marfan syndrome, cardiovascular syphilis, and cardiovascular tuberculosis.

[0663] Arrhythmias include sinus arrhythmia, atrial fibrillation, atrial flutter, bradycardia, extrasystole, Adams-Stokes Syndrome, bundle-branch block, sinoatrial block, long QT syndrome, parasystole, Lown-Ganong-Levine Syndrome, Mahaim-type pre-excitation syndrome, Wolff-Parkinson-White syndrome, sick sinus syndrome, tachycardias, and ventricular fibrillation. Tachycardias include paroxysmal tachycardia, supraventricular tachycardia, accelerated idioventricular rhythm, atrioventricular nodal reentry tachycardia, ectopic atrial tachycardia, ectopic junctional tachycardia, sinoatrial nodal reentry tachycardia, sinus tachycardia, Torsades de Pointes, and ventricular tachycardia.

[0664] Heart valve disease include aortic valve insufficiency, aortic valve stenosis, heart murmurs, aortic valve prolapse, mitral valve prolapse, tricuspid valve prolapse, mitral valve insufficiency, mitral valve stenosis, pulmonary atresia, pulmonary valve insufficiency, pulmonary valve stenosis, tricuspid atresia, tricuspid valve insufficiency, tricuspid valve stenosis, and bicuspid aortic valve.

[0665] Myocardial diseases include alcoholic cardiomyopathy, congestive cardiomyopathy, hypertrophic cardiomyopathy, aortic subvalvular stenosis, pulmonary subvalvular stenosis, restrictive cardiomyopathy, Chagas cardiomyopathy, endocardial fibroelastosis, endomyocardial fibrosis, Kearns Syndrome, Barth syndrome, myocardial reperfusion injury, and myocarditis.

[0666] Myocardial ischemias include coronary disease, such as angina pectoris, Prinzmetal's angina, unstable angina, coronary aneurysm, coronary arteriosclerosis, coronary thrombosis, coronary vasospasm, myocardial infarction and myocardial stunning.

[0667] Cardiovascular diseases also include vascular diseases such as aneurysms, angiodysplasia, angiomatosis, bacillary angiomatosis, Hippel-Lindau Disease, Klippel-Trenaunay-Weber Syndrome, Sturge-Weber Syndrome, angioneurotic edema, aortic diseases, Takayasu's Arteritis, aortitis, Leriche's Syndrome, arterial occlusive diseases, arteritis, enarteritis, polyarteritis nodosa, cerebrovascular disorders, diabetic angiopathies, diabetic retinopathy, embolisms, thrombosis, erythromelalgia, hemorrhoids, hepatic veno-occlusive disease, hypertension, hypotension (shock), ischemia, peripheral vascular diseases, phlebitis, superficial phlebitis, pulmonary veno-occlusive disease, chronic obstructive pulmonary disease, Buerger's disease, Raynaud's disease, CREST syndrome, retinal vein occlusion, Scimitar syndrome, superior vena cava syndrome, telangiectasia, atacia telangiectasia, hereditary hemorrhagic telangiectasia, deep vein thrombosis, varicocele, varicose veins, varicose ulcer, vasculitis, and venous insufficiency.

[0668] Aneurysms include dissecting aneurysms, false aneurysms, infected aneurysms, ruptured aneurysms, aortic aneurysms, cerebral aneurysms, coronary aneurysms, heart aneurysms, and iliac aneurysms.

[0669] Arterial occlusive diseases include arteriosclerosis, arteriolosclerosis, atherosclerosis, intermittent claudication, carotid stenosis, fibromuscular dysplasias, mesenteric vascular occlusion, Moyamoya disease, renal artery obstruction, retinal artery occlusion, and thromboangiitis obliterans.

[0670] Cerebrovascular disorders include carotid artery diseases, cerebral amyloid angiopathy, cerebral aneurysm, cerebral anoxia, cerebral arteriosclerosis, cerebral arteriovenous malformation, cerebral artery diseases, cerebral embolism and thrombosis, carotid artery thrombosis, sinus thrombosis, Wallenberg's syndrome, cerebral hemorrhage, epidural hematoma, subdural hematoma, subaraxhnoid hemorrhage, cerebral infarction, cerebral ischemia (including transient), subclavian steal syndrome, periventricular leukomalacia, vascular headache, cluster headache, migraine, and vertebrobasilar insufficiency.

[0671] Embolisms include air embolisms, amniotic fluid embolisms, cholesterol embolisms, blue toe syndrome, fat embolisms, pulmonary embolisms, and thromoboembolisms. Thrombosis include coronary thrombosis, hepatic vein thrombosis, deep vein thrombosis, retinal vein occlusion, carotid artery thrombosis, sinus thrombosis, Wallenberg's syndrome, and thrombophlebitis.

[0672] Ischemia includes cerebral ischemia, ischemic colitis, silent ischemia, compartment syndromes, anterior compartment syndrome, myocardial ischemia, reperfusion injuries, and peripheral limb ischemia. Vasculitis includes aortitis, arteritis, Behcet's Syndrome, Churg-Strauss Syndrome, mucocutaneous lymph node syndrome, thromboangiitis obliterans, hypersensitivity vasculitis, Schoenlein-Henoch purpura, allergic cutaneous vasculitis, and Wegener's granulomatosis.

[0673] Cardiovascular diseases can also occur due to electrolyte imbalances that include, but are not limited to hyponatremia, hypematremia, hypokalemia, hyperkalemia, hypocalcemia, hypercalcemia, hypophosphatemia, and hyperphophatemia. Neoplasm and/or cancers of the cardiovascular system include, but are not limited to, myxomas, fibromas, and rhabdomyomas.

[0674] Polypeptides may be administered using any method known in the art, including, but not limited to, direct needle injection at the delivery site, intravenous injection, topical administration, catheter infusion, biolistic injectors, particle accelerators, gelfoam sponge depots, other commercially available depot materials, osmotic pumps, oral or suppositorial solid pharmaceutical formulations, decanting or topical applications during surgery, aerosol delivery. Such methods are known in the art. Polypeptides may be administered as part of a Therapeutic, described in more detail below. Methods of delivering polynucleotides are described in more detail herein.

[0675] Anti-Angiogenesis Activity

[0676] The naturally occurring balance between endogenous stimulators and inhibitors of angiogenesis is one in which inhibitory influences predominate. Rastinejad et al., Cell 56:345-355 (1989). In those rare instances in which neovascularization occurs under normal physiological conditions, such as wound healing, organ regeneration, embryonic development, and female reproductive processes, angiogenesis is stringently regulated and spatially and temporally delimited. Under conditions of pathological angiogenesis such as that characterizing solid tumor growth, these regulatory controls fail. Unregulated angiogenesis becomes pathologic and sustains progression of many neoplastic and non-neoplastic diseases. A number of serious diseases are dominated by abnormal neovascularization including solid tumor growth and metastases, arthritis, some types of eye disorders, and psoriasis. See, e.g., reviews by Moses et al., Biotech. 9:630-634 (1991); Folkman et al., N. Engl. J. Med., 333:1757-1763 (1995); Auerbach et al., J. Microvasc. Res. 29:401-411 (1985); Folkman, Advances in Cancer Research, eds. Klein and Weinhouse, Academic Press, New York, pp. 175-203 (1985); Patz, Am. J. Opthalmol. 94:715-743 (1982); and Folkman et al., Science 221:719-725 (1983). In a number of pathological conditions, the process of angiogenesis contributes to the disease state. For example, significant data have accumulated which suggest that the growth of solid tumors is dependent on angiogenesis. Folkman and Klagsbrun, Science 235:442-447 (1987).

[0677] The present invention provides for treatment of diseases or disorders associated with neovascularization by administration of the polynucleotides and/or polypeptides of the invention, as well as agonists or antagonists of the present invention. Malignant and metastatic conditions which can be treated with the polynucleotides and polypeptides, or agonists or antagonists of the invention include, but are not limited to, malignancies, solid tumors, and cancers described herein and otherwise known in the art (for a review of such disorders, see Fishman et al., Medicine, 2d Ed., J. B. Lippincott Co., Philadelphia (1985)). Thus, the present invention provides a method of treating an angiogenesis-related disease and/or disorder, comprising administration to an individual in need thereof a therapeutically effective amount of a polynucleotide, polypeptide, antagonist and/or agonist of the invention. For example, polynucleotides, polypeptides, antagonists and/or agonists may be utilized in a variety of additional methods in order to therapeutically treat a cancer or tumor. Cancers which may be treated with polynucleotides, polypeptides, antagonists and/or agonists include, but are not limited to solid tumors, including prostate, lung, breast, ovarian, stomach, pancreas, larynx, esophagus, testes, liver, parotid, biliary tract, colon, rectum, cervix, uterus, endometrium, kidney, bladder, thyroid cancer; primary tumors and metastases; melanomas; glioblastoma; Kaposi's sarcoma; leiomyosarcoma; non-small cell lung cancer; colorectal cancer; advanced malignancies; and blood born tumors such as leukemias. For example, polynucleotides, polypeptides, antagonists and/or agonists may be delivered topically, in order to treat cancers such as skin cancer, head and neck tumors, breast tumors, and Kaposi's sarcoma.

[0678] Within yet other aspects, polynucleotides, polypeptides, antagonists and/or agonists may be utilized to treat superficial forms of bladder cancer by, for example, intravesical administration. Polynucleotides, polypeptides, antagonists and/or agonists may be delivered directly into the tumor, or near the tumor site, via injection or a catheter. Of course, as the artisan of ordinary skill will appreciate, the appropriate mode of administration will vary according to the cancer to be treated. Other modes of delivery are discussed herein.

[0679] Polynucleotides, polypeptides, antagonists and/or agonists may be useful in treating other disorders, besides cancers, which involve angiogenesis. These disorders include, but are not limited to: benign tumors, for example hemangiomas, acoustic neuromas, neurofibromas, trachomas, and pyogenic granulomas; artheroscleric plaques; ocular angiogenic diseases, for example, diabetic retinopathy, retinopathy of prematurity, macular degeneration, corneal graft rejection, neovascular glaucoma, retrolental fibroplasia, rubeosis, retinoblastoma, uvietis and Pterygia (abnormal blood vessel growth) of the eye; rheumatoid arthritis; psoriasis; delayed wound healing; endometriosis; vasculogenesis; granulations; hypertrophic scars (keloids); nonunion fractures; scleroderma; trachoma; vascular adhesions; myocardial angiogenesis; coronary collaterals; cerebral collaterals; arteriovenous malformations; ischemic limb angiogenesis; Osler-Webber Syndrome; plaque neovascularization; telangiectasia; hemophiliac joints; angiofibroma; fibromuscular dysplasia; wound granulation; Crohn's disease; and atherosclerosis.

[0680] For example, within one aspect of the present invention methods are provided for treating hypertrophic scars and keloids, comprising the step of administering a polynucleotide, polypeptide, antagonist and/or agonist of the invention to a hypertrophic scar or keloid.

[0681] Within one embodiment of the present invention polynucleotides, polypeptides, antagonists and/or agonists of the invention are directly injected into a hypertrophic scar or keloid, in order to prevent the progression of these lesions. This therapy is of particular value in the prophylactic treatment of conditions which are known to result in the development of hypertrophic scars and keloids (e.g., burns), and is preferably initiated after the proliferative phase has had time to progress (approximately 14 days after the initial injury), but before hypertrophic scar or keloid development. As noted above, the present invention also provides methods for treating neovascular diseases of the eye, including for example, corneal neovascularization, neovascular glaucoma, proliferative diabetic retinopathy, retrolental fibroplasia and macular degeneration.

[0682] Moreover, ocular disorders associated with neovascularization which can be treated with the polynucleotides and polypeptides of the present invention (including agonists and/or antagonists) include, but are not limited to: neovascular glaucoma, diabetic retinopathy, retinoblastoma, retrolental fibroplasia, uveitis, retinopathy of prematurity macular degeneration, corneal graft neovascularization, as well as other eye inflammatory diseases, ocular tumors and diseases associated with choroidal or iris neovascularization. See, e.g., reviews by Waltman et al., Am. J. Ophthal. 85:704-710 (1978) and Gartner et al., Surv. Ophthal 22:291-312 (1978).

[0683] Thus, within one aspect of the present invention methods are provided for treating neovascular diseases of the eye such as corneal neovascularization (including corneal graft neovascularization), comprising the step of administering to a patient a therapeutically effective amount of a compound (as described above) to the cornea, such that the formation of blood vessels is inhibited. Briefly, the cornea is a tissue, which normally lacks blood vessels. In certain pathological conditions however, capillaries may extend into the cornea from the pericorneal vascular plexus of the limbus. When the cornea becomes vascularized, it also becomes clouded, resulting in a decline in the patient's visual acuity. Visual loss may become complete if the cornea completely opacitates. A wide variety of disorders can result in corneal neovascularization, including for example, corneal infections (e.g., trachoma, herpes simplex keratitis, leishmaniasis and onchocerciasis), immunological processes (e.g., graft rejection and Stevens-Johnson's syndrome), alkali burns, trauma, inflammation (of any cause), toxic and nutritional deficiency states, and as a complication of wearing contact lenses.

[0684] Within particularly preferred embodiments of the invention, may be prepared for topical administration in saline (combined with any of the preservatives and antimicrobial agents commonly used in ocular preparations), and administered in eyedrop form. The solution or suspension may be prepared in its pure form and administered several times daily. Alternatively, anti-angiogenic compositions, prepared as described above, may also be administered directly to the cornea. Within preferred embodiments, the anti-angiogenic composition is prepared with a muco-adhesive polymer, which binds to cornea. Within further embodiments, the anti-angiogenic factors or anti-angiogenic compositions may be utilized as an adjunct to conventional steroid therapy. Topical therapy may also be useful prophylactically in corneal lesions which are known to have a high probability of inducing an angiogenic response (such as chemical burns). In these instances the treatment, likely in combination with steroids, may be instituted immediately to help prevent subsequent complications.

[0685] Within other embodiments, the compounds described above may be injected directly into the corneal stroma by an ophthalmologist under microscopic guidance. The preferred site of injection may vary with the morphology of the individual lesion, but the goal of the administration would be to place the composition at the advancing front of the vasculature (i.e., interspersed between the blood vessels and the normal cornea). In most cases this would involve perilimbic corneal injection to “protect” the cornea from the advancing blood vessels. This method may also be utilized shortly after a corneal insult in order to prophylactically prevent corneal neovascularization. In this situation, the material could be injected in the perilimbic cornea interspersed between the corneal lesion and its undesired potential limbic blood supply. Such methods may also be utilized in a similar fashion to prevent capillary invasion of transplanted corneas. In a sustained-release form, injections might only be required 2-3 times per year. A steroid could also be added to the injection solution to reduce inflammation resulting from the injection itself.

[0686] Within another aspect of the present invention, methods are provided for treating neovascular glaucoma, comprising the step of administering to a patient a therapeutically effective amount of a polynucleotide, polypeptide, antagonist and/or agonist to the eye, such that the formation of blood vessels is inhibited. In one embodiment, the compound may be administered topically to the eye in order to treat early forms of neovascular glaucoma. Within other embodiments, the compound may be implanted by injection into the region of the anterior chamber angle. Within other embodiments, the compound may also be placed in any location such that the compound is continuously released into the aqueous humor. Within another aspect of the present invention, methods are provided for treating proliferative diabetic retinopathy, comprising the step of administering to a patient a therapeutically effective amount of a polynucleotide, polypeptide, antagonist and/or agonist to the eyes, such that the formation of blood vessels is inhibited.

[0687] Within particularly preferred embodiments of the invention, proliferative diabetic retinopathy may be treated by injection into the aqueous humor or the vitreous, in order to increase the local concentration of the polynucleotide, polypeptide, antagonist and/or agonist in the retina. Preferably, this treatment should be initiated prior to the acquisition of severe disease requiring photocoagulation.

[0688] Within another aspect of the present invention, methods are provided for treating retrolental fibroplasia, comprising the step of administering to a patient a therapeutically effective amount of a polynucleotide, polypeptide, antagonist and/or agonist to the eye, such that the formation of blood vessels is inhibited. The compound may be administered topically, via intravitreous injection and/or via intraocular implants.

[0689] Additionally, disorders which can be treated with the polynucleotides, polypeptides, agonists and/or agonists include, but are not limited to, hemangioma, arthritis, psoriasis, angiofibroma, atherosclerotic plaques, delayed wound healing, granulations, hemophilic joints, hypertrophic scars, nonunion fractures, Osler-Weber syndrome, pyogenic granuloma, scleroderma, trachoma, and vascular adhesions.

[0690] Moreover, disorders and/or states, which can be treated, prevented, diagnosed and/or prognosed with the polynucleotides, polypeptides, agonists and/or agonists of the invention include, but are not limited to, solid tumors, blood born tumors such as leukemias, tumor metastasis, Kaposi's sarcoma, benign tumors, for example hemangiomas, acoustic neuromas, neurofibromas, trachomas, and pyogenic granulomas, rheumatoid arthritis, psoriasis, ocular angiogenic diseases, for example, diabetic retinopathy, retinopathy of prematurity, macular degeneration, corneal graft rejection, neovascular glaucoma, retrolental fibroplasia, rubeosis, retinoblastoma, and uvietis, delayed wound healing, endometriosis, vascluogenesis, granulations, hypertrophic scars (keloids), nonunion fractures, scleroderma, trachoma, vascular adhesions, myocardial angiogenesis, coronary collaterals, cerebral collaterals, arteriovenous malformations, ischemic limb angiogenesis, Osler-Webber Syndrome, plaque neovascularization, telangiectasia, hemophiliac joints, angiofibroma fibromuscular dysplasia, wound granulation, Crohn's disease, atherosclerosis, birth control agent by preventing vascularization required for embryo implantation controlling menstruation, diseases that have angiogenesis as a pathologic consequence such as cat scratch disease (Rochele minalia quintosa), ulcers (Helicobacter pylori), Bartonellosis and bacillary angiomatosis.

[0691] In one aspect of the birth control method, an amount of the compound sufficient to block embryo implantation is administered before or after intercourse and fertilization have occurred, thus providing an effective method of birth control, possibly a “morning after” method. Polynucleotides, polypeptides, agonists and/or agonists may also be used in controlling menstruation or administered as either a peritoneal lavage fluid or for peritoneal implantation in the treatment of endometriosis.

[0692] Polynucleotides, polypeptides, agonists and/or agonists of the present invention may be incorporated into surgical sutures in order to prevent stitch granulomas.

[0693] Polynucleotides, polypeptides, agonists and/or agonists may be utilized in a wide variety of surgical procedures. For example, within one aspect of the present invention a compositions (in the form of, for example, a spray or film) may be utilized to coat or spray an area prior to removal of a tumor, in order to isolate normal surrounding tissues from malignant tissue, and/or to prevent the spread of disease to surrounding tissues. Within other aspects of the present invention, compositions (e.g., in the form of a spray) may be delivered via endoscopic procedures in order to coat tumors, or inhibit angiogenesis in a desired locale. Within yet other aspects of the present invention, surgical meshes, which have been coated with anti- angiogenic compositions of the present invention may be utilized in any procedure wherein a surgical mesh might be utilized. For example, within one embodiment of the invention a surgical mesh laden with an anti-angiogenic composition may be utilized during abdominal cancer resection surgery (e.g., subsequent to colon resection) in order to provide support to the structure, and to release an amount of the anti-angiogenic factor.

[0694] Within further aspects of the present invention, methods are provided for treating tumor excision sites, comprising administering a polynucleotide, polypeptide, agonist and/or agonist to the resection margins of a tumor subsequent to excision, such that the local recurrence of cancer and the formation of new blood vessels at the site is inhibited. Within one embodiment of the invention, the anti-angiogenic compound is administered directly to the tumor excision site (e.g., applied by swabbing, brushing or otherwise coating the resection margins of the tumor with the anti-angiogenic compound). Alternatively, the anti-angiogenic compounds may be incorporated into known surgical pastes prior to administration. Within particularly preferred embodiments of the invention, the anti-angiogenic compounds are applied after hepatic resections for malignancy, and after neurosurgical operations.

[0695] Within one aspect of the present invention, polynucleotides, polypeptides, agonists and/or agonists may be administered to the resection margin of a wide variety of tumors, including for example, breast, colon, brain and hepatic tumors. For example, within one embodiment of the invention, anti-angiogenic compounds may be administered to the site of a neurological tumor subsequent to excision, such that the formation of new blood vessels at the site are inhibited.

[0696] The polynucleotides, polypeptides, agonists and/or agonists of the present invention may also be administered along with other anti-angiogenic factors. Representative examples of other anti-angiogenic factors include: Anti-Invasive Factor, retinoic acid and derivatives thereof, paclitaxel, Suramin, Tissue Inhibitor of Metalloproteinase-1, Tissue Inhibitor of Metalloproteinase-2, Plasminogen Activator Inhibitor-1, Plasminogen Activator Inhibitor-2, and various forms of the lighter “d group” transition metals.

[0697] Lighter “d group” transition metals include, for example, vanadium, molybdenum, tungsten, titanium, niobium, and tantalum species. Such transition metal species may form transition metal complexes. Suitable complexes of the above-mentioned transition metal species include oxo transition metal complexes.

[0698] Representative examples of vanadium complexes include oxo vanadium complexes such as vanadate and vanadyl complexes. Suitable vanadate complexes include metavanadate and orthovanadate complexes such as, for example, ammonium metavanadate, sodium metavanadate, and sodium orthovanadate. Suitable vanadyl complexes include, for example, vanadyl acetylacetonate and vanadyl sulfate including vanadyl sulfate hydrates such as vanadyl sulfate mono- and trihydrates.

[0699] Representative examples of tungsten and molybdenum complexes also include oxo complexes. Suitable oxo tungsten complexes include tungstate and tungsten oxide complexes. Suitable tungstate complexes include ammonium tungstate, calcium tungstate, sodium tungstate dihydrate, and tungstic acid. Suitable tungsten oxides include tungsten (IV) oxide and tungsten (VI) oxide. Suitable oxo molybdenum complexes include molybdate, molybdenum oxide, and molybdenyl complexes. Suitable molybdate complexes include ammonium molybdate and its hydrates, sodium molybdate and its hydrates, and potassium molybdate and its hydrates. Suitable molybdenum oxides include molybdenum (VI) oxide, molybdenum (VI) oxide, and molybdic acid. Suitable molybdenyl complexes include, for example, molybdenyl acetylacetonate. Other suitable tungsten and molybdenum complexes include hydroxo derivatives derived from, for example, glycerol, tartaric acid, and sugars.

[0700] A wide variety of other anti-angiogenic factors may also be utilized within the context of the present invention. Representative examples include platelet factor 4; protamine sulphate; sulphated chitin derivatives (prepared from queen crab shells), (Murata et al., Cancer Res. 51:22-26 (1991)); Sulphated Polysaccharide Peptidoglycan Complex (SP-PG) (the function of this compound may be enhanced by the presence of steroids such as estrogen, and tamoxifen citrate); Staurosporine; modulators of matrix metabolism, including for example, proline analogs, cishydroxyproline, d,L-3,4-dehydroproline, Thiaproline, alpha,alpha-dipyridyl, aminopropionitrile fumarate; 4-propyl-5-(4-pyridinyl)-2(3H)-oxazolone; Methotrexate; Mitoxantrone; Heparin; Interferons; 2 Macroglobulin-serum; ChIMP-3 (Pavloff et al., J. Bio. Chem. 267:17321-17326 (1992)); Chymostatin (Tomkinson et al., Biochem J. 286:475-480 (1992)); Cyclodextrin Tetradecasulfate; Eponemycin; Camptothecin; Fumagillin (Ingber et al., Nature 348:555-557 (1990)); Gold Sodium Thiomalate (“GST”; Matsubara and Ziff, J. Clin. Invest. 79:1440-1446 (1987)); anticollagenase-serum; alpha2-antiplasmin (Holmes et al., J. Biol. Chem. 262(4):1659-1664 (1987)); Bisantrene (National Cancer Institute); Lobenzarit disodium (N-(2)-carboxyphenyl-4-chloroanthronilic acid disodium or “CCA”; Takeuchi et al., Agents Actions 36:312-316, 1992); Thalidomide; Angostatic steroid; AGM-1470; carboxynaminolmidazole; and metalloproteinase inhibitors such as BB94.

[0701] Musculoskeletal System Disorders

[0702] Polynucleotides, polypeptides, antibodies, and/or agonists or antagonists of the present invention, may be used to treat, prevent, diagnose, and/or prognose disorders of the musculoskeletal system, including but not limited to, disorders of the bone, joints, ligaments, tendons, bursa, muscle, and/or neoplasms and cancers associated with musculoskeletal tissue.

[0703] Diseases or disorders of the bone include, but are not limited to, Albers-Schönberg disease, bowlegs, heel spurs, Köhler's bone disease, knock-knees, Legg-Calvé-Perthes disease, Marfan's syndrome, mucopolysaccharidoses, Osgood-Schlatter disease, osteochondroses, osteochondrodysplasia, osteomyelitis, osteopetroses, osteoporosis (postmenopausal, senile, and juvenile), Paget's disease, Scheuermann's disease, scoliosis, Sever's disease, and patellofemoral stress syndrome.

[0704] Joint diseases or disorders include, but are not limited to, ankylosing spondylitis, Bechet's syndrome, CREST syndrome, Ehlers-Danlos syndrome, infectious arthritis, discoid lupus erythematosus, systemic lupus erythematosus, Lyme disease, osteoarthritis, psoriatic arthritis, relapsing polychondrites, Reiter's syndrome, rheumatoid arthritis (adult and juvenile), scleroderma, and Still's disease.

[0705] Diseases or disorders affecting ligaments, tendons, or bursa include, but are not limited to, ankle sprain, bursitis, posterior Achilles tendon bursitis (Haglund's deformity), anterior Achilles tendon bursitis (Albert's disease), tendinitis, tenosynovitis, poplieus tendinitis, Achilles tendinitis, medial or lateral epicondylitis, rotator cuff tendinitis, spasmodic torticollis, and fibromyalgia syndrome.

[0706] Muscle diseases or disorders include, but are not limited to, Becker's muscular dystrophy, Duchenne's muscular dystrophy, Landouzy-Dejerine muscular dystrophy, Leyden-Möbius muscular dystrophy, Erb's muscular dystrophy, Charcot's joints, dermatomyositis, gout, pseudogout, glycogen storage diseases, Pompe's disease, mitochondrial myopathy, periodic paralysis, polymyalgia rheumatica, polymyositis, Steinert's disease, Thomsen's disease, anterolateral and posteromedial shin splints, posterior femoral muscle strain, and fibromyositis.

[0707] Musculoskeletal tissue may also develop cancers and/or neoplasms that include, but are not limited to, osteochondroma, benign chondroma, chondroblastoma, chondromyxoid fibroma, osteoid osteoma, giant cell tumor, multiple myeloma, osteosarcoma, fibrosarcoma, malignant fibrous histiocytoma, chondrosarcoma, Ewing's tumor, and malignant lymphoma of bone.

[0708] Neural Activity and Neurological Diseases

[0709] The polynucleotides, polypeptides and agonists or antagonists of the invention may be used for the diagnosis and/or treatment of diseases, disorders, damage or injury of the brain and/or nervous system. Nervous system disorders that can be treated with the compositions of the invention (e.g., polypeptides, polynucleotides, and/or agonists or antagonists), include, but are not limited to, nervous system injuries, and diseases or disorders which result in either a disconnection of axons, a diminution or degeneration of neurons, or demyelination. Nervous system lesions which may be treated in a patient (including human and non-human mammalian patients) according to the methods of the invention, include but are not limited to, the following lesions of either the central (including spinal cord, brain) or peripheral nervous systems: (1) ischemic lesions, in which a lack of oxygen in a portion of the nervous system results in neuronal injury or death, including cerebral infarction or ischemia, or spinal cord infarction or ischemia; (2) traumatic lesions, including lesions caused by physical injury or associated with surgery, for example, lesions which sever a portion of the nervous system, or compression injuries; (3) malignant lesions, in which a portion of the nervous system is destroyed or injured by malignant tissue which is either a nervous system associated malignancy or a malignancy derived from non-nervous system tissue; (4) infectious lesions, in which a portion of the nervous system is destroyed or injured as a result of infection, for example, by an abscess or associated with infection by human immunodeficiency virus, herpes zoster, or herpes simplex virus or with Lyme disease, tuberculosis, or syphilis; (5) degenerative lesions, in which a portion of the nervous system is destroyed or injured as a result of a degenerative process including but not limited to, degeneration associated with Parkinson's disease, Alzheimer's disease, Huntington's chorea, or amyotrophic lateral sclerosis (ALS); (6) lesions associated with nutritional diseases or disorders, in which a portion of the nervous system is destroyed or injured by a nutritional disorder or disorder of metabolism including, but not limited to, vitamin B 12 deficiency, folic acid deficiency, Wernicke disease, tobacco-alcohol amblyopia, Marchiafava-Bignami disease (primary degeneration of the corpus callosum), and alcoholic cerebellar degeneration; (7) neurological lesions associated with systemic diseases including, but not limited to, diabetes (diabetic neuropathy, Bell's palsy), systemic lupus erythematosus, carcinoma, or sarcoidosis; (8) lesions caused by toxic substances including alcohol, lead, or particular neurotoxins; and (9) demyelinated lesions in which a portion of the nervous system is destroyed or injured by a demyelinating disease including, but not limited to, multiple sclerosis, human immunodeficiency virus-associated myelopathy, transverse myelopathy or various etiologies, progressive multifocal leukoencephalopathy, and central pontine myelinolysis.

[0710] In one embodiment, the polypeptides, polynucleotides, or agonists or antagonists of the invention are used to protect neural cells from the damaging effects of hypoxia. In a further preferred embodiment, the polypeptides, polynucleotides, or agonists or antagonists of the invention are used to protect neural cells from the damaging effects of cerebral hypoxia. According to this embodiment, the compositions of the invention are used to treat or prevent neural cell injury associated with cerebral hypoxia. In one non-exclusive aspect of this embodiment, the polypeptides, polynucleotides, or agonists or antagonists of the invention, are used to treat or prevent neural cell injury associated with cerebral ischemia. In another non-exclusive aspect of this embodiment, the polypeptides, polynucleotides, or agonists or antagonists of the invention are used to treat or prevent neural cell injury associated with cerebral infarction.

[0711] In another preferred embodiment, the polypeptides, polynucleotides, or agonists or antagonists of the invention are used to treat or prevent neural cell injury associated with a stroke. In a specific embodiment, the polypeptides, polynucleotides, or agonists or antagonists of the invention are used to treat or prevent cerebral neural cell injury associated with a stroke.

[0712] In another preferred embodiment, the polypeptides, polynucleotides, or agonists or antagonists of the invention are used to treat or prevent neural cell injury associated with a heart attack. In a specific embodiment, the polypeptides, polynucleotides, or agonists or antagonists of the invention are used to treat or prevent cerebral neural cell injury associated with a heart attack.

[0713] The compositions of the invention which are useful for treating or preventing a nervous system disorder may be selected by testing for biological activity in promoting the survival or differentiation of neurons. For example, and not by way of limitation, compositions of the invention which elicit any of the following effects may be useful according to the invention: (1) increased survival time of neurons in culture either in the presence or absence of hypoxia or hypoxic conditions; (2) increased sprouting of neurons in culture or in vivo; (3) increased production of a neuron-associated molecule in culture or in vivo, e.g., choline acetyltransferase or acetylcholinesterase with respect to motor neurons; or (4) decreased symptoms of neuron dysfunction in vivo. Such effects may be measured by any method known in the art. In preferred, non-limiting embodiments, increased survival of neurons may routinely be measured using a method set forth herein or otherwise known in the art, such as, for example, in Zhang et al., Proc Natl Acad Sci USA 97:3637-42 (2000) or in Arakawa et al., J. Neurosci., 10:3507-15 (1990); increased sprouting of neurons may be detected by methods known in the art, such as, for example, the methods set forth in Pestronk et al., Exp. Neurol., 70:65-82 (1980), or Brown et al., Ann. Rev. Neurosci., 4:17-42 (1981); increased production of neuron-associated molecules may be measured by bioassay, enzymatic assay, antibody binding, Northern blot assay, etc., using techniques known in the art and depending on the molecule to be measured; and motor neuron dysfunction may be measured by assessing the physical manifestation of motor neuron disorder, e.g., weakness, motor neuron conduction velocity, or functional disability.

[0714] In specific embodiments, motor neuron disorders that may be treated according to the invention include, but are not limited to, disorders such as infarction, infection, exposure to toxin, trauma, surgical damage, degenerative disease or malignancy that may affect motor neurons as well as other components of the nervous system, as well as disorders that selectively affect neurons such as amyotrophic lateral sclerosis, and including, but not limited to, progressive spinal muscular atrophy, progressive bulbar palsy, primary lateral sclerosis, infantile and juvenile muscular atrophy, progressive bulbar paralysis of childhood (Fazio-Londe syndrome), poliomyelitis and the post polio syndrome, and Hereditary Motorsensory Neuropathy (Charcot-Marie-Tooth Disease).

[0715] Further, polypeptides or polynucleotides of the invention may play a role in neuronal survival; synapse formation; conductance; neural differentiation, etc. Thus, compositions of the invention (including polynucleotides, polypeptides, and agonists or antagonists) may be used to diagnose and/or treat or prevent diseases or disorders associated with these roles, including, but not limited to, learning and/or cognition disorders. The compositions of the invention may also be useful in the treatment or prevention of neurodegenerative disease states and/or behavioural disorders. Such neurodegenerative disease states and/or behavioral disorders include, but are not limited to, Alzheimer's Disease, Parkinson's Disease, Huntington's Disease, Tourette Syndrome, schizophrenia, mania, dementia, paranoia, obsessive compulsive disorder, panic disorder, learning disabilities, ALS, psychoses, autism, and altered behaviors, including disorders in feeding, sleep patterns, balance, and perception. In addition, compositions of the invention may also play a role in the treatment, prevention and/or detection of developmental disorders associated with the developing embryo, or sexually-linked disorders.

[0716] Additionally, polypeptides, polynucleotides and/or agonists or antagonists of the invention, may be useful in protecting neural cells from diseases, damage, disorders, or injury, associated with cerebrovascular disorders including, but not limited to, carotid artery diseases (e.g., carotid artery thrombosis, carotid stenosis, or Moyamoya Disease), cerebral amyloid angiopathy, cerebral aneurysm, cerebral anoxia, cerebral arteriosclerosis, cerebral arteriovenous malformations, cerebral artery diseases, cerebral embolism and thrombosis (e.g., carotid artery thrombosis, sinus thrombosis, or Wallenberg's Syndrome), cerebral hemorrhage (e.g., epidural or subdural hematoma, or subarachnoid hemorrhage), cerebral infarction, cerebral ischemia (e.g., transient cerebral ischemia, Subclavian Steal Syndrome, or vertebrobasilar insufficiency), vascular dementia (e.g., multi-infarct), leukomalacia, periventricular, and vascular headache (e.g., cluster headache or migraines).

[0717] In accordance with yet a further aspect of the present invention, there is provided a process for utilizing polynucleotides or polypeptides, as well as agonists or antagonists of the present invention, for therapeutic purposes, for example, to stimulate neurological cell proliferation and/or differentiation. Therefore, polynucleotides, polypeptides, agonists and/or antagonists of the invention may be used to treat and/or detect neurologic diseases. Moreover, polynucleotides or polypeptides, or agonists or antagonists of the invention, can be used as a marker or detector of a particular nervous system disease or disorder.

[0718] Examples of neurologic diseases which can be treated or detected with polynucleotides, polypeptides, agonists, and/or antagonists of the present invention include brain diseases, such as metabolic brain diseases which includes phenylketonuria such as maternal phenylketonuria, pyruvate carboxylase deficiency, pyruvate dehydrogenase complex deficiency, Wernicke's Encephalopathy, brain edema, brain neoplasms such as cerebellar neoplasms which include infratentorial neoplasms, cerebral ventricle neoplasms such as choroid plexus neoplasms, hypothalamic neoplasms, supratentorial neoplasms, canavan disease, cerebellar diseases such as cerebellar ataxia which include spinocerebellar degeneration such as ataxia telangiectasia, cerebellar dyssynergia, Friederich's Ataxia, Machado-Joseph Disease, olivopontocerebellar atrophy, cerebellar neoplasms such as infratentorial neoplasms, diffuse cerebral sclerosis such as encephalitis periaxialis, globoid cell leukodystrophy, metachromatic leukodystrophy and subacute sclerosing panencephalitis.

[0719] Additional neurologic diseases which can be treated or detected with polynucleotides, polypeptides, agonists, and/or antagonists of the present invention include cerebrovascular disorders (such as carotid artery diseases which include carotid artery thrombosis, carotid stenosis and Moyamoya Disease), cerebral amyloid angiopathy, cerebral aneurysm, cerebral anoxia, cerebral arteriosclerosis, cerebral arteriovenous malformations, cerebral artery diseases, cerebral embolism and thrombosis such as carotid artery thrombosis, sinus thrombosis and Wallenberg's Syndrome, cerebral hemorrhage such as epidural hematoma, subdural hematoma and subarachnoid hemorrhage, cerebral infarction, cerebral ischemia such as transient cerebral ischemia, Subclavian Steal Syndrome and vertebrobasilar insufficiency, vascular dementia such as multi-infarct dementia, periventricular leukomalacia, vascular headache such as cluster headache and migraine.

[0720] Additional neurologic diseases which can be treated or detected with polynucleotides, polypeptides, agonists, and/or antagonists of the present invention include dementia such as AIDS Dementia Complex, presenile dementia such as Alzheimer's Disease and Creutzfeldt-Jakob Syndrome, senile dementia such as Alzheimer's Disease and progressive supranuclear palsy, vascular dementia such as multi-infarct dementia, encephalitis which include encephalitis periaxialis, viral encephalitis such as epidemic encephalitis, Japanese Encephalitis, St. Louis Encephalitis, tick-borne encephalitis and West Nile Fever, acute disseminated encephalomyelitis, meningoencephalitis such as uveomeningoencephalitic syndrome, Postencephalitic Parkinson Disease and subacute sclerosing panencephalitis, encephalomalacia such as periventricular leukomalacia, epilepsy such as generalized epilepsy which includes infantile spasms, absence epilepsy, myoclonic epilepsy which includes MERRF Syndrome, tonic-clonic epilepsy, partial epilepsy such as complex partial epilepsy, frontal lobe epilepsy and temporal lobe epilepsy, post-traumatic epilepsy, status epilepticus such as Epilepsia Partialis Continua, and Hallervorden-Spatz Syndrome.

[0721] Additional neurologic diseases which can be treated or detected with polynucleotides, polypeptides, agonists, and/or antagonists of the present invention include hydrocephalus such as Dandy-Walker Syndrome and normal pressure hydrocephalus, hypothalamic diseases such as hypothalamic neoplasms, cerebral malaria, narcolepsy which includes cataplexy, bulbar poliomyelitis, cerebri pseudotumor, Rett Syndrome, Reye's Syndrome, thalamic diseases, cerebral toxoplasmosis, intracranial tuberculoma and Zellweger Syndrome, central nervous system infections such as AIDS Dementia Complex, Brain Abscess, subdural empyema, encephalomyelitis such as Equine Encephalomyelitis, Venezuelan Equine Encephalomyelitis, Necrotizing Hemorrhagic Encephalomyelitis, Visna, and cerebral malaria.

[0722] Additional neurologic diseases which can be treated or detected with polynucleotides, polypeptides, agonists, and/or antagonists of the present invention include meningitis such as arachnoiditis, aseptic meningtitis such as viral meningtitis which includes lymphocytic choriomeningitis, Bacterial meningtitis which includes Haemophilus Meningtitis, Listeria Meningtitis, Meningococcal Meningtitis such as Waterhouse-Friderichsen Syndrome, Pneumococcal Meningtitis and meningeal tuberculosis, fungal meningitis such as Cryptococcal Meningtitis, subdural effusion, meningoencephalitis such as uvemeningoencephalitic syndrome, myelitis such as transverse myelitis, neurosyphilis such as tabes dorsalis, poliomyelitis which includes bulbar poliomyelitis and postpoliomyelitis syndrome, prion diseases (such as Creutzfeldt-Jakob Syndrome, Bovine Spongiform Encephalopathy, Gerstmann-Straussler Syndrome, Kuru, Scrapie), and cerebral toxoplasmosis.

[0723] Additional neurologic diseases which can be treated or detected with polynucleotides, polypeptides, agonists, and/or antagonists of the present invention include central nervous system neoplasms such as brain neoplasms that include cerebellar neoplasms such as infratentorial neoplasms, cerebral ventricle neoplasms such as choroid plexus neoplasms, hypothalamic neoplasms and supratentorial neoplasms, meningeal neoplasms, spinal cord neoplasms which include epidural neoplasms, demyelinating diseases such as Canavan Diseases, diffuse cerebral sceloris which includes adrenoleukodystrophy, encephalitis periaxialis, globoid cell leukodystrophy, diffuse cerebral sclerosis such as metachromatic leukodystrophy, allergic encephalomyelitis, necrotizing hemorrhagic encephalomyelitis, progressive multifocal leukoencephalopathy, multiple sclerosis, central pontine myelinolysis, transverse myelitis, neuromyelitis optica, Scrapie, Swayback, Chronic Fatigue Syndrome, Visna, High Pressure Nervous Syndrome, Meningism, spinal cord diseases such as amyotonia congenita, amyotrophic lateral sclerosis, spinal muscular atrophy such as Werdnig-Hoffmann Disease, spinal cord compression, spinal cord neoplasms such as epidural neoplasms, syringomyelia, Tabes Dorsalis, Stiff-Man Syndrome, mental retardation such as Angelman Syndrome, Cri-du-Chat Syndrome, De Lange's Syndrome, Down Syndrome, Gangliosidoses such as gangliosidoses G(M1), Sandhoff Disease, Tay-Sachs Disease, Hartnup Disease, homocystinuria, Laurence-Moon-Biedl Syndrome, Lesch-Nyhan Syndrome, Maple Syrup Urine Disease, mucolipidosis such as fucosidosis, neuronal ceroid-lipofuscinosis, oculocerebrorenal syndrome, phenylketonuria such as maternal phenylketonuria, Prader-Willi Syndrome, Rett Syndrome, Rubinstein-Taybi Syndrome, Tuberous Sclerosis, WAGR Syndrome, nervous system abnormalities such as holoprosencephaly, neural tube defects such as anencephaly which includes hydrangencephaly, Arnold-Chairi Deformity, encephalocele, meningocele, meningomyelocele, spinal dysraphism such as spina bifida cystica and spina bifida occulta.

[0724] Additional neurologic diseases which can be treated or detected with polynucleotides, polypeptides, agonists, and/or antagonists of the present invention include hereditary motor and sensory neuropathies which include Charcot-Marie Disease, Hereditary optic atrophy, Refsum's Disease, hereditary spastic paraplegia, Werdnig-Hoffmann Disease, Hereditary Sensory and Autonomic Neuropathies such as Congenital Analgesia and Familial Dysautonomia, Neurologic manifestations (such as agnosia that include Gerstmann's Syndrome, Amnesia such as retrograde amnesia, apraxia, neurogenic bladder, cataplexy, communicative disorders such as hearing disorders that includes deafness, partial hearing loss, loudness recruitment and tinnitus, language disorders such as aphasia which include agraphia, anomia, broca aphasia, and Wernicke Aphasia, Dyslexia such as Acquired Dyslexia, language development disorders, speech disorders such as aphasia which includes anomia, broca aphasia and Wernicke Aphasia, articulation disorders, communicative disorders such as speech disorders which include dysarthria, echolalia, mutism and stuttering, voice disorders such as aphonia and hoarseness, decerebrate state, delirium, fasciculation, hallucinations, meningism, movement disorders such as angelman syndrome, ataxia, athetosis, chorea, dystonia, hypokinesia, muscle hypotonia, myoclonus, tic, torticollis and tremor, muscle hypertonia such as muscle rigidity such as stiff-man syndrome, muscle spasticity, paralysis such as facial paralysis which includes Herpes Zoster Oticus, Gastroparesis, Hemiplegia, ophthalmoplegia such as diplopia, Duane's Syndrome, Horner's Syndrome, Chronic progressive external ophthalmoplegia such as Kearns Syndrome, Bulbar Paralysis, Tropical Spastic Paraparesis, Paraplegia such as Brown-Sequard Syndrome, quadriplegia, respiratory paralysis and vocal cord paralysis, paresis, phantom limb, taste disorders such as ageusia and dysgeusia, vision disorders such as amblyopia, blindness, color vision defects, diplopia, hemianopsia, scotoma and subnormal vision, sleep disorders such as hypersomnia which includes Kleine-Levin Syndrome, insomnia, and somnambulism, spasm such as trismus, unconsciousness such as coma, persistent vegetative state and syncope and vertigo, neuromuscular diseases such as amyotonia congenita, amyotrophic lateral sclerosis, Lambert-Eaton Myasthenic Syndrome, motor neuron disease, muscular atrophy such as spinal muscular atrophy, Charcot-Marie Disease and Werdnig-Hoffmann Disease, Postpoliomyelitis Syndrome, Muscular Dystrophy, Myasthenia Gravis, Myotonia Atrophica, Myotonia Confenita, Nemaline Myopathy, Familial Periodic Paralysis, Multiplex Paramyloclonus, Tropical Spastic Paraparesis and Stiff-Man Syndrome, peripheral nervous system diseases such as acrodynia, amyloid neuropathies, autonomic nervous system diseases such as Adie's Syndrome, Barre-Lieou Syndrome, Familial Dysautonomia, Horner's Syndrome, Reflex Sympathetic Dystrophy and Shy-Drager Syndrome, Cranial Nerve Diseases such as Acoustic Nerve Diseases such as Acoustic Neuroma which includes Neurofibromatosis 2, Facial Nerve Diseases such as Facial Neuralgia,Melkersson-Rosenthal Syndrome, ocular motility disorders which includes amblyopia, nystagmus, oculomotor nerve paralysis, ophthalmoplegia such as Duane's Syndrome, Homer's Syndrome, Chronic Progressive External Ophthalmoplegia which includes Kearns Syndrome, Strabismus such as Esotropia and Exotropia, Oculomotor Nerve Paralysis, Optic Nerve Diseases such as Optic Atrophy which includes Hereditary Optic Atrophy, Optic Disk Drusen, Optic Neuritis such as Neuromyelitis Optica, Papilledema, Trigeminal Neuralgia, Vocal Cord Paralysis, Demyelinating Diseases such as Neuromyelitis Optica and Swayback, and Diabetic neuropathies such as diabetic foot.

[0725] Additional neurologic diseases which can be treated or detected with polynucleotides, polypeptides, agonists, and/or antagonists of the present invention include nerve compression syndromes such as carpal tunnel syndrome, tarsal tunnel syndrome, thoracic outlet syndrome such as cervical rib syndrome, ulnar nerve compression syndrome, neuralgia such as causalgia, cervico-brachial neuralgia, facial neuralgia and trigeminal neuralgia, neuritis such as experimental allergic neuritis, optic neuritis, polyneuritis, polyradiculoneuritis and radiculities such as polyradiculitis, hereditary motor and sensory neuropathies such as Charcot-Marie Disease, Hereditary Optic Atrophy, Refsum's Disease, Hereditary Spastic Paraplegia and Werdnig-Hoffmann Disease, Hereditary Sensory and Autonomic Neuropathies which include Congenital Analgesia and Familial Dysautonomia, POEMS Syndrome, Sciatica, Gustatory Sweating and Tetany).

[0726] Endocrine Disorders

[0727] Polynucleotides or polypeptides, or agonists or antagonists of the present invention, may be used to treat, prevent, diagnose, and/or prognose disorders and/or diseases related to hormone imbalance, and/or disorders or diseases of the endocrine system.

[0728] Hormones secreted by the glands of the endocrine system control physical growth, sexual function, metabolism, and other functions. Disorders may be classified in two ways: disturbances in the production of hormones, and the inability of tissues to respond to hormones. The etiology of these hormone imbalance or endocrine system diseases, disorders or conditions may be genetic, somatic, such as cancer and some autoimmune diseases, acquired (e.g., by chemotherapy, injury or toxins), or infectious. Moreover, polynucleotides, polypeptides, antibodies, and/or agonists or antagonists of the present invention can be used as a marker or detector of a particular disease or disorder related to the endocrine system and/or hormone imbalance.

[0729] Endocrine system and/or hormone imbalance and/or diseases encompass disorders of uterine motility including, but not limited to: complications with pregnancy and labor (e.g., pre-term labor, post-term pregnancy, spontaneous abortion, and slow or stopped labor); and disorders and/or diseases of the menstrual cycle (e.g., dysmenorrhea and endometriosis).

[0730] Endocrine system and/or hormone imbalance disorders and/or diseases include disorders and/or diseases of the pancreas, such as, for example, diabetes mellitus, diabetes insipidus, congenital pancreatic agenesis, pheochromocytoma—islet cell tumor syndrome; disorders and/or diseases of the adrenal glands such as, for example, Addison's Disease, corticosteroid deficiency, virilizing disease, hirsutism, Cushing's Syndrome, hyperaldosteronism, pheochromocytoma; disorders and/or diseases of the pituitary gland, such as, for example, hyperpituitarism, hypopituitarism, pituitary dwarfism, pituitary adenoma, panhypopituitarism, acromegaly, gigantism; disorders and/or diseases of the thyroid, including but not limited to, hyperthyroidism, hypothyroidism, Plummer's disease, Graves' disease (toxic diffuse goiter), toxic nodular goiter, thyroiditis (Hashimoto's thyroiditis, subacute granulomatous thyroiditis, and silent lymphocytic thyroiditis), Pendred's syndrome, myxedema, cretinism, thyrotoxicosis, thyroid hormone coupling defect, thymic aplasia, Hurthle cell tumours of the thyroid, thyroid cancer, thyroid carcinoma, Medullary thyroid carcinoma; disorders and/or diseases of the parathyroid, such as, for example, hyperparathyroidism, hypoparathyroidism; disorders and/or diseases of the hypothalamus.

[0731] In addition, endocrine system and/or hormone imbalance disorders and/or diseases may also include disorders and/or diseases of the testes or ovaries, including cancer. Other disorders and/or diseases of the testes or ovaries further include, for example, ovarian cancer, polycystic ovary syndrome, Klinefelter's syndrome, vanishing testes syndrome (bilateral anorchia), congenital absence of Leydig's cells, cryptorchidism, Noonan's syndrome, myotonic dystrophy, capillary haemangioma of the testis (benign), neoplasias of the testis and neo-testis.

[0732] Moreover, endocrine system and/or hormone imbalance disorders and/or diseases may also include disorders and/or diseases such as, for example, polyglandular deficiency syndromes, pheochromocytoma, neuroblastoma, multiple Endocrine neoplasia, and disorders and/or cancers of endocrine tissues.

[0733] In another embodiment, a polypeptide of the invention, or polynucleotides, antibodies, agonists, or antagonists corresponding to that polypeptide, may be used to diagnose, prognose, prevent, and/or treat endocrine diseases and/or disorders associated with the tissue(s) in which the polypeptide of the invention is expressed, including one, two, three, four, five, or more tissues disclosed in Table 1A, column 7 (Tissue Distribution Library Code).

[0734] Gastrointestinal Disorders

[0735] Polynucleotides or polypeptides, or agonists or antagonists of the present invention, may be used to treat, prevent, diagnose, and/or prognose gastrointestinal disorders, including inflammatory diseases and/or conditions, infections, cancers (e.g., intestinal neoplasms (carcinoid tumor of the small intestine, non-Hodgkin's lymphoma of the small intestine, small bowl lymphoma)), and ulcers, such as peptic ulcers.

[0736] Gastrointestinal disorders include dysphagia, odynophagia, inflammation of the esophagus, peptic esophagitis, gastric reflux, submucosal fibrosis and stricturing, Mallory-Weiss lesions, leiomyomas, lipomas, epidermal cancers, adeoncarcinomas, gastric retention disorders, gastroenteritis, gastric atrophy, gastric/stomach cancers, polyps of the stomach, autoimmune disorders such as pernicious anemia, pyloric stenosis, gastritis (bacterial, viral, eosinophilic, stress-induced, chronic erosive, atrophic, plasma cell, and Menetrier's), and peritoneal diseases (e.g., chyloperioneum, hemoperitoneum, mesenteric cyst, mesenteric lymphadenitis, mesenteric vascular occlusion, panniculitis, neoplasms, peritonitis, pneumoperitoneum, bubphrenic abscess).

[0737] Gastrointestinal disorders also include disorders associated with the small intestine, such as malabsorption syndromes, distension, irritable bowel syndrome, sugar intolerance, celiac disease, duodenal ulcers, duodenitis, tropical sprue, Whipple's disease, intestinal lymphangiectasia, Crohn's disease, appendicitis, obstructions of the ileum, Meckel's diverticulum, multiple diverticula, failure of complete rotation of the small and large intestine, lymphoma, and bacterial and parasitic diseases (such as Traveler's diarrhea, typhoid and paratyphoid, cholera, infection by Roundworms (Ascariasis lumbricoides), Hookworms (Ancylostoma duodenale), Threadworms (Enterobius vermicularis), Tapeworms (Taenia saginata, Echinococcus granulosus, Diphyllobothrium spp., and T. solium).

[0738] Liver diseases and/or disorders include intrahepatic cholestasis (alagille syndrome, biliary liver cirrhosis), fatty liver (alcoholic fatty liver, reye syndrome), hepatic vein thrombosis, hepatolentricular degeneration, hepatomegaly, hepatopulmonary syndrome, hepatorenal syndrome, portal hypertension (esophageal and gastric varices), liver abscess (amebic liver abscess), liver cirrhosis (alcoholic, biliary and experimental), alcoholic liver diseases (fatty liver, hepatitis, cirrhosis), parasitic (hepatic echinococcosis, fascioliasis, amebic liver abscess), jaundice (hemolytic, hepatocellular, and cholestatic), cholestasis, portal hypertension, liver enlargement, ascites, hepatitis (alcoholic hepatitis, animal hepatitis, chronic hepatitis (autoimmune, hepatitis B, hepatitis C, hepatitis D, drug induced), toxic hepatitis, viral human hepatitis (hepatitis A, hepatitis B, hepatitis C, hepatitis D, hepatitis E), Wilson's disease, granulomatous hepatitis, secondary biliary cirrhosis, hepatic encephalopathy, portal hypertension, varices, hepatic encephalopathy, primary biliary cirrhosis, primary sclerosing cholangitis, hepatocellular adenoma, hemangiomas, bile stones, liver failure (hepatic encephalopathy, acute liver failure), and liver neoplasms (angiomyolipoma, calcified liver metastases, cystic liver metastases, epithelial tumors, fibrolamellar hepatocarcinoma, focal nodular hyperplasia, hepatic adenoma, hepatobiliary cystadenoma, hepatoblastoma, hepatocellular carcinoma, hepatoma, liver cancer, liver hemangioendothelioma, mesenchymal hamartoma, mesenchymal tumors of liver, nodular regenerative hyperplasia, benign liver tumors (Hepatic cysts [Simple cysts, Polycystic liver disease, Hepatobiliary cystadenoma, Choledochal cyst], Mesenchymal tumors [Mesenchymal hamartoma, Infantile hemangioendothelioma, Hemangioma, Peliosis hepatis, Lipomas, Inflammatory pseudotumor, Miscellaneous], Epithelial tumors [Bile duct epithelium (Bile duct hamartoma, Bile duct adenoma), Hepatocyte (Adenoma, Focal nodular hyperplasia, Nodular regenerative hyperplasia)], malignant liver tumors [hepatocellular, hepatoblastoma, hepatocellular carcinoma, cholangiocellular, cholangiocarcinoma, cystadenocarcinoma, tumors of blood vessels, angiosarcoma, Karposi's sarcoma, hemangioendothelioma, other tumors, embryonal sarcoma, fibrosarcoma, leiomyosarcoma, rhabdomyosarcoma, carcinosarcoma, teratoma, carcinoid, squamous carcinoma, primary lymphoma]), peliosis hepatis, erythrohepatic porphyria, hepatic porphyria (acute intermittent porphyria, porphyria cutanea tarda), Zellweger syndrome).

[0739] Pancreatic diseases and/or disorders include acute pancreatitis, chronic pancreatitis (acute necrotizing pancreatitis, alcoholic pancreatitis), neoplasms (adenocarcinoma of the pancreas, cystadenocarcinoma, insulinoma, gastrinoma, and glucagonoma, cystic neoplasms, islet-cell tumors, pancreoblastoma), and other pancreatic diseases (e.g., cystic fibrosis, cyst (pancreatic pseudocyst, pancreatic fistula, insufficiency)).

[0740] Gallbladder diseases include gallstones (cholelithiasis and choledocholithiasis), postcholecystectomy syndrome, diverticulosis of the gallbladder, acute cholecystitis, chronic cholecystitis, bile duct tumors, and mucocele.

[0741] Diseases and/or disorders of the large intestine include antibiotic-associated colitis, diverticulitis, ulcerative colitis, acquired megacolon, abscesses, fungal and bacterial infections, anorectal disorders (e.g., fissures, hemorrhoids), colonic diseases (colitis, colonic neoplasms [colon cancer, adenomatous colon polyps (e.g., villous adenoma), colon carcinoma, colorectal cancer], colonic diverticulitis, colonic diverticulosis, megacolon [Hirschsprung disease, toxic megacolon]; sigmoid diseases [proctocolitis, sigmoin neoplasms]), constipation, Crohn's disease, diarrhea (infantile diarrhea, dysentery), duodenal diseases (duodenal neoplasms, duodenal obstruction, duodenal ulcer, duodenitis), enteritis (enterocolitis), HIV enteropathy, ileal diseases (ileal neoplasms, ileitis), immunoproliferative small intestinal disease, inflammatory bowel disease (ulcerative colitis, Crohn's disease), intestinal atresia, parasitic diseases (anisakiasis, balantidiasis, blastocystis infections, cryptosporidiosis, dientamoebiasis, amebic dysentery, giardiasis), intestinal fistula (rectal fistula), intestinal neoplasms (cecal neoplasms, colonic neoplasms, duodenal neoplasms, ileal neoplasms, intestinal polyps, jejunal neoplasms, rectal neoplasms), intestinal obstruction (afferent loop syndrome, duodenal obstruction, impacted feces, intestinal pseudo-obstruction [cecal volvulus], intussusception), intestinal perforation, intestinal polyps (colonic polyps, gardner syndrome, peutz-jeghers syndrome), jejunal diseases (jejunal neoplasms), malabsorption syndromes (blind loop syndrome, celiac disease, lactose intolerance, short bowl syndrome, tropical sprue, whipple's disease), mesenteric vascular occlusion, pneumatosis cystoides intestinalis, protein-losing enteropathies (intestinal lymphagiectasis), rectal diseases (anus diseases, fecal incontinence, hemorrhoids, proctitis, rectal fistula, rectal prolapse, rectocele), peptic ulcer (duodenal ulcer, peptic esophagitis, hemorrhage, perforation, stomach ulcer, Zollinger-Ellison syndrome), postgastrectomy syndromes (dumping syndrome), stomach diseases (e.g., achlorhydria, duodenogastric reflux (bile reflux), gastric antral vascular ectasia, gastric fistula, gastric outlet obstruction, gastritis (atrophic or hypertrophic), gastroparesis, stomach dilatation, stomach diverticulum, stomach neoplasms (gastric cancer, gastric polyps, gastric adenocarcinoma, hyperplastic gastric polyp), stomach rupture, stomach ulcer, stomach volvulus), tuberculosis, visceroptosis, vomiting (e.g., hematemesis, hyperemesis gravidarum, postoperative nausea and vomiting) and hemorrhagic colitis.

[0742] Further diseases and/or disorders of the gastrointestinal system include biliary tract diseases, such as, gastroschisis, fistula (e.g., biliary fistula, esophageal fistula, gastric fistula, intestinal fistula, pancreatic fistula), neoplasms (e.g., biliary tract neoplasms, esophageal neoplasms, such as adenocarcinoma of the esophagus, esophageal squamous cell carcinoma, gastrointestinal neoplasms, pancreatic neoplasms, such as adenocarcinoma of the pancreas, mucinous cystic neoplasm of the pancreas, pancreatic cystic neoplasms, pancreatoblastoma, and peritoneal neoplasms), esophageal disease (e.g., bullous diseases, candidiasis, glycogenic acanthosis, ulceration, barrett esophagus varices, atresia, cyst, diverticulum (e.g., Zenker's diverticulum), fistula (e.g., tracheoesophageal fistula), motility disorders (e.g., CREST syndrome, deglutition disorders, achalasia, spasm, gastroesophageal reflux), neoplasms, perforation (e.g., Boerhaave syndrome, Mallory-Weiss syndrome), stenosis, esophagitis, diaphragmatic hernia (e.g., hiatal hernia); gastrointestinal diseases, such as, gastroenteritis (e.g., cholera morbus, norwalk virus infection), hemorrhage (e.g., hematemesis, melena, peptic ulcer hemorrhage), stomach neoplasms (gastric cancer, gastric polyps, gastric adenocarcinoma, stomach cancer)), hernia (e.g., congenital diaphragmatic hernia, femoral hernia, inguinal hernia, obturator hernia, umbilical hernia, ventral hernia), and intestinal diseases (e.g., cecal diseases (appendicitis, cecal neoplasms)).

[0743] Reproductive System Disorders

[0744] The polynucleotides or polypeptides, or agonists or antagonists of the invention may be used for the diagnosis, treatment, or prevention of diseases and/or disorders of the reproductive system. Reproductive system disorders that can be treated by the compositions of the invention, include, but are not limited to, reproductive system injuries, infections, neoplastic disorders, congenital defects, and diseases or disorders which result in infertility, complications with pregnancy, labor, or parturition, and postpartum difficulties.

[0745] Reproductive system disorders and/or diseases include diseases and/or disorders of the testes, including, but not limited to, testicular atrophy, testicular feminization, cryptorchism (unilateral and bilateral), anorchia, ectopic testis, epididymitis and orchitis (typically resulting from infections such as, for example, gonorrhea, mumps, tuberculosis, and syphilis), testicular torsion, vasitis nodosa, germ cell tumors (e.g., seminomas, embryonal cell carcinomas, teratocarcinomas, choriocarcinomas, yolk sac tumors, and teratomas), stromal tumors (e.g., Leydig cell tumors), hydrocele, hematocele, varicocele, spermatocele, inguinal hernia, and disorders of sperm production (e.g., immotile cilia syndrome, aspermia, asthenozoospermia, azoospermia, oligospermia, and teratozoospermia).

[0746] Reproductive system disorders also include, but are not limited to, disorders of the prostate gland, such as acute non-bacterial prostatitis, chronic non-bacterial prostatitis, acute bacterial prostatitis, chronic bacterial prostatitis, prostatodystonia, prostatosis, granulomatous prostatitis, malacoplakia, benign prostatic hypertrophy or hyperplasia, and prostate neoplastic disorders, including adenocarcinomas, transitional cell carcinomas, ductal carcinomas, and squamous cell carcinomas.

[0747] Additionally, the compositions of the invention may be useful in the diagnosis, treatment, and/or prevention of disorders or diseases of the penis and urethra, including, but not limited to, inflammatory disorders, such as balanoposthitis, balanitis xerotica obliterans, phimosis, paraphimosis, syphilis, herpes simplex virus, gonorrhea, non-gonococcal urethritis, chlamydia, mycoplasma, trichomonas, HIV, AIDS, Reiter's syndrome, condyloma acuminatum, condyloma latum, and pearly penile papules; urethral abnormalities, such as hypospadias, epispadias, and phimosis; premalignant lesions, including Erythroplasia of Queyrat, Bowen's disease, Bowenoid paplosis, giant condyloma of Buscke-Lowenstein, and varrucous carcinoma; penile cancers, including squamous cell carcinomas, carcinoma in situ, verrucous carcinoma, and disseminated penile carcinoma; urethral neoplastic disorders, including penile urethral carcinoma, bulbomembranous urethral carcinoma, and prostatic urethral carcinoma; and erectile disorders, such as priapism, Peyronie's disease, erectile dysfunction, and impotence.

[0748] Moreover, diseases and/or disorders of the vas deferens include, but are not limited to, vasculititis and CBAVD (congenital bilateral absence of the vas deferens); additionally, the polynucleotides, polypeptides, and agonists or antagonists of the present invention may be used in the diagnosis, treatment, and/or prevention of diseases and/or disorders of the seminal vesicles, including but not limited to, hydatid disease, congenital chloride diarrhea, and polycystic kidney disease.

[0749] Other disorders and/or diseases of the male reproductive system that may be diagnosed, treated, and/or prevented with the compositions of the invention include, but are not limited to, Klinefelter's syndrome, Young's syndrome, premature ejaculation, diabetes mellitus, cystic fibrosis, Kartagener's syndrome, high fever, multiple sclerosis, and gynecomastia.

[0750] Further, the polynucleotides, polypeptides, and agonists or antagonists of the present invention may be used in the diagnosis, treatment, and/or prevention of diseases and/or disorders of the vagina and vulva, including, but not limited to, bacterial vaginosis, candida vaginitis, herpes simplex virus, chancroid, granuloma inguinale, lymphogranuloma venereum, scabies, human papillomavirus, vaginal trauma, vulvar trauma, adenosis, chlamydia vaginitis, gonorrhea, trichomonas vaginitis, condyloma acuminatum, syphilis, molluscum contagiosum, atrophic vaginitis, Paget's disease, lichen sclerosus, lichen planus, vulvodynia, toxic shock syndrome, vaginismus, vulvovaginitis, vulvar vestibulitis, and neoplastic disorders, such as squamous cell hyperplasia, clear cell carcinoma, basal cell carcinoma, melanomas, cancer of Bartholin's gland, and vulvar intraepithelial neoplasia.

[0751] Disorders and/or diseases of the uterus that may be diagnosed, treated, and/or prevented with the compositions of the invention include, but are not limited to, dysmenorrhea, retroverted uterus, endometriosis, fibroids, adenomyosis, anovulatory bleeding, amenorrhea, Cushing's syndrome, hydatidiform moles, Asherman's syndrome, premature menopause, precocious puberty, uterine polyps, dysfunctional uterine bleeding (e.g., due to aberrant hormonal signals), and neoplastic disorders, such as adenocarcinomas, keiomyosarcomas, and sarcomas. Additionally, the polypeptides, polynucleotides, or agonists or antagonists of the invention may be useful as a marker or detector of, as well as in the diagnosis, treatment, and/or prevention of congenital uterine abnormalities, such as bicornuate uterus, septate uterus, simple unicornuate uterus, unicornuate uterus with a noncavitary rudimentary horn, unicornuate uterus with a non-communicating cavitary rudimentary horn, unicornuate uterus with a communicating cavitary horn, arcuate uterus, uterine didelfus, and T-shaped uterus.

[0752] Ovarian diseases and/or disorders that may be diagnosed, treated, and/or prevented with the compositions of the invention include, but are not limited to, anovulation, polycystic ovary syndrome (Stein-Leventhal syndrome), ovarian cysts, ovarian hypofunction, ovarian insensitivity to gonadotropins, ovarian overproduction of androgens, right ovarian vein syndrome, amenorrhea, hirutism, and ovarian cancer (including, but not limited to, primary and secondary cancerous growth, Sertoli-Leydig tumors, endometriod carcinoma of the ovary, ovarian papillary serous adenocarcinoma, ovarian mucinous adenocarcinoma, and Ovarian Krukenberg tumors).

[0753] Cervical diseases and/or disorders that may be diagnosed, treated, and/or prevented with the compositions of the invention include, but are not limited to, cervicitis, chronic cervicitis, mucopurulent cervicitis, cervical dysplasia, cervical polyps, Nabothian cysts, cervical erosion, cervical incompetence, and cervical neoplasms (including, for example, cervical carcinoma, squamous metaplasia, squamous cell carcinoma, adenosquamous cell neoplasia, and columnar cell neoplasia).

[0754] Additionally, diseases and/or disorders of the reproductive system that may be diagnosed, treated, and/or prevented with the compositions of the invention include, but are not limited to, disorders and/or diseases of pregnancy, including miscarriage and stillbirth, such as early abortion, late abortion, spontaneous abortion, induced abortion, therapeutic abortion, threatened abortion, missed abortion, incomplete abortion, complete abortion, habitual abortion, missed abortion, and septic abortion; ectopic pregnancy, anemia, Rh incompatibility, vaginal bleeding during pregnancy, gestational diabetes, intrauterine growth retardation, polyhydramnios, HELLP syndrome, abruptio placentae, placenta previa, hyperemesis, preeclampsia, eclampsia, herpes gestationis, and urticaria of pregnancy. Additionally, the polynucleotides, polypeptides, and agonists or antagonists of the present invention may be used in the diagnosis, treatment, and/or prevention of diseases that can complicate pregnancy, including heart disease, heart failure, rheumatic heart disease, congenital heart disease, mitral valve prolapse, high blood pressure, anemia, kidney disease, infectious disease (e.g., rubella, cytomegalovirus, toxoplasmosis, infectious hepatitis, chlamydia, HIV, AIDS, and genital herpes), diabetes mellitus, Graves' disease, thyroiditis, hypothyroidism, Hashimoto's thyroiditis, chronic active hepatitis, cirrhosis of the liver, primary biliary cirrhosis, asthma, systemic lupus eryematosis, rheumatoid arthritis, myasthenia gravis, idiopathic thrombocytopenic purpura, appendicitis, ovarian cysts, gallbladder disorders,and obstruction of the intestine.

[0755] Complications associated with labor and parturition that may be diagnosed, treated, and/or prevented with the compositions of the invention include, but are not limited to, premature rupture of the membranes, pre-term labor, post-term pregnancy, postmaturity, labor that progresses too slowly, fetal distress (e.g., abnormal heart rate (fetal or maternal), breathing problems, and abnormal fetal position), shoulder dystocia, prolapsed umbilical cord, amniotic fluid embolism, and aberrant uterine bleeding.

[0756] Further, diseases and/or disorders of the postdelivery period, that may be diagnosed, treated, and/or prevented with the compositions of the invention, include, but are not limited to, endometritis, myometritis, parametritis, peritonitis, pelvic thrombophlebitis, pulmonary embolism, endotoxemia, pyelonephritis, saphenous thrombophlebitis, mastitis, cystitis, postpartum hemorrhage, and inverted uterus.

[0757] Other disorders and/or diseases of the female reproductive system that may be diagnosed, treated, and/or prevented by the polynucleotides, polypeptides, and agonists or antagonists of the present invention include, but are not limited to, Turner's syndrome, pseudohermaphroditism, premenstrual syndrome, pelvic inflammatory disease, pelvic congestion (vascular engorgement), frigidity, anorgasmia, dyspareunia, ruptured fallopian tube, and Mittelschmerz.

[0758] Developmental and Inherited Disorders

[0759] Polynuceotides or polypeptides, or agonists or antagonists of the present invention may be used to treat, prevent, diagnose, and/or prognose diseases associated with mixed fetal tissues, including, but not limited to, developmental and inherited disorders or defects of the nervous system, musculoskelelal system, execretory system, cardiovascular system, hematopoietic system, gastrointestinal system, reproductive system, and respiratory system. Compositions of the present invention may also be used to treat, prevent, diagnose, and/or prognose developmental and inherited disorders or defects associated with, but not limited to, skin, hair, visual, and auditory tissues, metabolism. Additionally, the compositions of the invention may be useful in the diagnosis, treatment, and/or prevention of disorders or diseases associated with, but not limited to, chromosomal or genetic abnormalities and hyperproliferation or neoplasia.

[0760] Disorders or defects of the nervous system associated with developmental or inherited abnormalities that may be diagnosed, treated, and/or prevented with the compostions of the invention include, but are not limited to, adrenoleukodystrophy, agenesis of corpus callosum, Alexander disease, anencephaly, Angelman syndrome, Arnold-Chiari deformity, Batten disease, Canavan disease, cephalic disorders, Charcot-Marie-Tooth disease, encephalocele, Friedreich's ataxia, Gaucher's disease, Gorlin syndrome, Hallervorden-Spatz disease, hereditary spastic paraplegia, Huntington disease, hydranencephaly, hydrocephalus, Joubert syndrome, Lesch-Nyhan syndrome, leukodystrophy, Menkes disease, microcephaly, Niemann-Pick Type C1, neurofibromatosis, porencephaly, progeria, proteus syndrome, Refsum disease, spina bifida, Sturge-Weber syndrome, Tay-Sachs disease, tuberous sclerosis, and von Hippel-Lindau disease.

[0761] Developmental and inherited disorders resulting in disorders or defects of the musculoskeletal system that may be diagnosed, treated, and/or prevented with the compositions of the invention include, but are not limited to, achondroplasia, atlanto-occipital fusion, arthrogryposis mulitplex congenita, autosomal recessive muscular dystrophy, Becker's muscular dystrophy, cerebral palsy, choanal atresia, cleft lip, cleft palate, clubfoot, congenital amputation, congenital dislocation of the hip, congenital torticollis, congenital scoliosis, dopa-repsonsive dystonia, Duchenne muscular dystrophy, early-onset generalized dystonia, femoral torsion, Gorlin syndrome, hypophosphatasia, Klippel-Feil syndrome, knee dislocation, myoclonic dystonia, myotonic dystrophy, nailpatella syndrome, osteogenesis imperfecta, paroxysmal dystonia, progeria, prune-belly syndrome, rapid-onset dystonia parkinsonism, scolosis, syndactyly, Treacher Collins' syndrome, velocardiofacial syndrome, and X-linked dystonia-parkinsonism.

[0762] Developmental or hereditary disorders or defects of the excretory system that may be diagnosed, treated, and/or prevented with the compositions of the invention include, but are not limited to, Alport's syndrome, Bartter's syndrome, bladder diverticula, bladder exstrophy, cystinuria, epispadias, Fanconi's syndrome, Hartnup disease, horseshoe kidney, hypospadias, kidney agenesis, kidney ectopia, kidney malrotation, Liddle's syndrome, medullary cystic disease, medullary sponge, multicystic kidney, kidney polycystic kidney disease, nail-patella syndrome, Potter's syndrome, urinary tract flow obstruction, vitamin D-resistant rickets, and Wilm's tumor.

[0763] Cardiovascular disorders or defects of developmental or hereditary origin that may be diagnosed, treated, and/or prevented with the compositions of the inventtion include, but are not limited to, aortic valve stenosis, atrial septal defects, artioventricular (A-V) canal defect, bicuspid aortic valve, coarctation or the aorta, dextrocardia, Ebstein's anomaly, Eisenmenger's complex, hypoplastic left heart syndrome, Marfan syndrome, patent ductus arteriosus, progeria, pulmonary atresia, pulmonary valve stenosis, subaortic stenosis, tetralogy of fallot, total anomalous pulmonary venous (P-V) connection, transposition of the great arteries, tricuspid atresia, truncus arteriosus, ventricular septal defects. Developmental or inherited disorders resulting in disorders involving the hematopoietic system that may be diagnosed, treated, and/or prevented with the compositions of the invention include, but not limited to, Bernard-Soulier syndrome, Chèdiak-Higashi syndrome, hemophilia, Hermansky-Pudlak syndrome, sickle cell anemia, storage pool disease, thromboxane A2 dysfunction, thrombasthenia, and von Willebrand's disease.

[0764] The compositions of the invention may also be used to diagnose, treat, and/or prevent developmental and inherited disorders resulting in disorders or defects of the gastrointestinal system, including, but not limited to, anal atresia, biliary atresia, esophageal atresia, diaphragmatic hernia, Hirschsprung's disease, Meckel's diverticulum, oligohydramnios, omphalocele, polyhydramnios, porphyria, situs inversus viscera. Developmental or inherited disorders resulting in metabolic disorders that may be diagnosed, treated, and/or prevented with the compositions of the invention include, but are not limited to, alpha-1 antitrypsin deficiency, cystic fibrosis, hemochromatosis, lysosomal storage disease, phenylketonuria, Wilson's disease, and Zellweger syndrome.

[0765] Disorders of the reproductive system that are developmentally or hereditary related that may also be diagnosed, treated, and/or prevented with the compositions of the invention include, but are not limited to, androgen insensitivity syndrome, ambiguous genitalia, autosomal sex reversal, congenital adreneal hyperplasia, gonadoblastoma, ovarian germ cell cancer, pseudohermphroditism, true hermaphroditism, undescended testis, XX male syndrome, and XY female type gonadal dysgenesis. The compositions of the invention may also be used to diagnose, treat, and/or prevent developmental or inherited respiratory defects including, but not limited to, askin tumor, azygos lobe, congenital diaphragmatic hernia, congenital lobar emphysema, cystic adenomatoid malformation, lobar emphysema, hyaline membrane disease, and pectus excavatum.

[0766] Developmental or inherited disorders may also result from chromosomal or genetic aberration that may be diagnosed, treated, and/or prevented with the compositions of the invention including, but not limited to, 4p-syndrome, cri du chat syndrome, Digeorge syndrome, Down's syndrome, Edward's syndrome, fragile X syndrome, Klinefelter's syndrome, Patau's syndrome, Prader-Willi syndrome, progeria, Turner's syndrome, triple X syndrome, and XYY syndrome. Other developmental disorders that can be diagnosed, treated, and/or prevented with the compositions of the invention, include, but are not limited to, fetal alcohol syndrome, and can be caused by environmental factors surrounding the developing fetus.

[0767] The compositions of the invention may further be able to be used to diagnose, treat, and/or prevent errors in development or a genetic disposition that may result in hyperproliferative disorders or neoplasms, including, but not limited to, acute childhood lymphoblastic leukemia, askin tumor, Beckwith-Wiedemann syndrome, childhood acute myeloid leukemia, childhood brain stem glioma, childhood cerebellar astrocytoma, childhood extracranial germ cell tumors childhood (primary), gonadoblastoma, hepatocellular cancer, childhood Hodgkin's disease, childhood Hodgkin's lymphoma, childhood hypothalamic and visual pathway glioma, childhood (primary) liver cancer, childhood lymphoblastic leukemia, childhood medulloblastoma, childhood non-Hodgkin's lymphoma, childhood pineal and supratentorial primitive neuroectodermal tumors, childhood primary liver cancer, childhood rhabdomyosarcoma, childhood soft tissue sarcoma, Gorlin syndrome, familial multiple endrocrine neoplasia type I, neuroblastoma, ovarian germ cell cancer, pheochromocytoma, retinoblastoma, and Wilm's tumor.

[0768] Polypeptides may be administered using any method known in the art, including, but not limited to, direct needle injection at the delivery site, intravenous injection, topical administration, catheter infusion, biolistic injectors, particle accelerators, gelfoam sponge depots, other commercially available depot materials, osmotic pumps, oral or suppositorial solid pharmaceutical formulations, decanting or topical applications during surgery, aerosol delivery. Such methods are known in the art. Polypeptides may be administered as part of a Therapeutic, described in more detail below. Methods of delivering polynucleotides are described in more detail herein.

[0769] Diseases at the Cellular Level

[0770] Diseases associated with increased cell survival or the inhibition of apoptosis that could be treated, prevented, diagnosed and/or prognosed using polynucleotides or polypeptides, as well as antagonists or agonists of the present invention, include cancers (such as follicular lymphomas, carcinomas with p53 mutations, and hormone-dependent tumors, including, but not limited to colon cancer, cardiac tumors, pancreatic cancer, melanoma, retinoblastoma, glioblastoma, lung cancer, intestinal cancer, testicular cancer, stomach cancer, neuroblastoma, myxoma, myoma, lymphoma, endothelioma, osteoblastoma, osteoclastoma, osteosarcoma, chondrosarcoma, adenoma, breast cancer, prostate cancer, Kaposi's sarcoma and ovarian cancer); autoimmune disorders (such as, multiple sclerosis, Sjogren's syndrome, Hashimoto's thyroiditis, biliary cirrhosis, Behcet's disease, Crohn's disease, polymyositis, systemic lupus erythematosus and immune-related glomerulonephritis and rheumatoid arthritis) and viral infections (such as herpes viruses, pox viruses and adenoviruses), inflammation, graft v. host disease, acute graft rejection, and chronic graft rejection.

[0771] In preferred embodiments, polynucleotides, polypeptides, and/or antagonists of the invention are used to inhibit growth, progression, and/or metastasis of cancers, in particular those [listed above] involving respiratory system tissues.

[0772] Additional diseases or conditions associated with increased cell survival that could be treated or detected by polynucleotides or polypeptides, or agonists or antagonists of the present invention include, but are not limited to, progression, and/or metastases of malignancies and related disorders such as leukemia (including acute leukemias (e.g., acute lymphocytic leukemia, acute myelocytic leukemia (including myeloblastic, promyelocytic, myelomonocytic, monocytic, and erythroleukemia)) and chronic leukemias (e.g., chronic myelocytic (granulocytic) leukemia and chronic lymphocytic leukemia)), polycythemia vera, lymphomas (e.g., Hodgkin's disease and non-Hodgkin's disease), multiple myeloma, Waldenstrom's macroglobulinemia, heavy chain disease, and solid tumors including, but not limited to, sarcomas and carcinomas such as fibrosarcoma, myxosarcoma, liposarcoma, chondrosarcoma, osteogenic sarcoma, chordoma, angiosarcoma, endotheliosarcoma, lymphangiosarcoma, lymphangioendotheliosarcoma, synovioma, mesothelioma, Ewing's tumor, leiomyosarcoma, rhabdomyosarcoma, colon carcinoma, pancreatic cancer, breast cancer, ovarian cancer, prostate cancer, squamous cell carcinoma, basal cell carcinoma, adenocarcinoma, sweat gland carcinoma, sebaceous gland carcinoma, papillary carcinoma, papillary adenocarcinomas, cystadenocarcinoma, medullary carcinoma, bronchogenic carcinoma, renal cell carcinoma, hepatoma, bile duct carcinoma, choriocarcinoma, seminoma, embryonal carcinoma, Wilm's tumor, cervical cancer, testicular tumor, lung carcinoma, small cell lung carcinoma, bladder carcinoma, epithelial carcinoma, glioma, astrocytoma, medulloblastoma, craniopharyngioma, ependymoma, pinealoma, hemangioblastoma, acoustic neuroma, oligodendroglioma, menangioma, melanoma, neuroblastoma, and retinoblastoma.

[0773] Diseases associated with increased apoptosis that could be treated, prevented, diagnosted, and/or prognosed using polynucleotides or polypeptides, as well as agonists or antagonists of the present invention, include, but are not limited to, AIDS; neurodegenerative disorders (such as Alzheimer's disease, Parkinson's disease, Amyotrophic lateral sclerosis, Retinitis pigmentosa, Cerebellar degeneration and brain tumor or prior associated disease); autoimmune disorders (such as, multiple sclerosis, Sjogren's syndrome, Hashimoto's thyroiditis, biliary cirrhosis, Behcet's disease, Crohn's disease, polymyositis, systemic lupus erythematosus and immune-related glomerulonephritis and rheumatoid arthritis) myelodysplastic syndromes (such as aplastic anemia), graft v. host disease, ischemic injury (such as that caused by myocardial infarction, stroke and reperfusion injury), liver injury (e.g., hepatitis related liver injury, ischemia/reperfusion injury, cholestosis (bile duct injury) and liver cancer); toxin-induced liver disease (such as that caused by alcohol), septic shock, cachexia and anorexia.

[0774] Wound Healing and Epithelial Cell Proliferation

[0775] In accordance with yet a further aspect of the present invention, there is provided a process for utilizing polynucleotides or polypeptides, as well as agonists or antagonists of the present invention, for therapeutic purposes, for example, to stimulate epithelial cell proliferation and basal keratinocytes for the purpose of wound healing, and to stimulate hair follicle production and healing of dermal wounds. Polynucleotides or polypeptides, as well as agonists or antagonists of the present invention, may be clinically useful in stimulating wound healing including surgical wounds, excisional wounds, deep wounds involving damage of the dermis and epidermis, eye tissue wounds, dental tissue wounds, oral cavity wounds, diabetic ulcers, dermal ulcers, cubitus ulcers, arterial ulcers, venous stasis ulcers, burns resulting from heat exposure or chemicals, and other abnormal wound healing conditions such as uremia, malnutrition, vitamin deficiencies and complications associated with systemic treatment with steroids, radiation therapy and antineoplastic drugs and antimetabolites. Polynucleotides or polypeptides, as well as agonists or antagonists of the present invention, could be used to promote dermal reestablishment subsequent to dermal loss.

[0776] Polynucleotides or polypeptides, as well as agonists or antagonists of the present invention, could be used to increase the adherence of skin grafts to a wound bed and to stimulate re-epithelialization from the wound bed. The following are types of grafts that polynucleotides or polypeptides, agonists or antagonists of the present invention, could be used to increase adherence to a wound bed: autografts, artificial skin, allografts, autodermic graft, autoepdermic grafts, avacular grafts, Blair-Brown grafts, bone graft, brephoplastic grafts, cutis graft, delayed graft, dermic graft, epidermic graft, fascia graft, full thickness graft, heterologous graft, xenograft, homologous graft, hyperplastic graft, lamellar graft, mesh graft, mucosal graft, Ollier-Thiersch graft, omenpal graft, patch graft, pedicle graft, penetrating graft, split skin graft, thick split graft. Polynucleotides or polypeptides, as well as agonists or antagonists of the present invention, can be used to promote skin strength and to improve the appearance of aged skin.

[0777] It is believed that polynucleotides or polypeptides, as well as agonists or antagonists of the present invention, will also produce changes in hepatocyte proliferation, and epithelial cell proliferation in the lung, breast, pancreas, stomach, small intestine, and large intestine. Polynucleotides or polypeptides, as well as agonists or antagonists of the present invention, could promote proliferation of epithelial cells such as sebocytes, hair follicles, hepatocytes, type II pneumocytes, mucin-producing goblet cells, and other epithelial cells and their progenitors contained within the skin, lung, liver, and gastrointestinal tract. Polynucleotides or polypeptides, agonists or antagonists of the present invention, may promote proliferation of endothelial cells, keratinocytes, and basal keratinocytes.

[0778] Polynucleotides or polypeptides, as well as agonists or antagonists of the present invention, could also be used to reduce the side effects of gut toxicity that result from radiation, chemotherapy treatments or viral infections. Polynucleotides or polypeptides, as well as agonists or antagonists of the present invention, may have a cytoprotective effect on the small intestine mucosa. Polynucleotides or polypeptides, as well as agonists or antagonists of the present invention, may also stimulate healing of mucositis (mouth ulcers) that result from chemotherapy and viral infections.

[0779] Polynucleotides or polypeptides, as well as agonists or antagonists of the present invention, could further be used in full regeneration of skin in full and partial thickness skin defects, including burns, (i.e., repopulation of hair follicles, sweat glands, and sebaceous glands), treatment of other skin defects such as psoriasis. Polynucleotides or polypeptides, as well as agonists or antagonists of the present invention, could be used to treat epidermolysis bullosa, a defect in adherence of the epidermis to the underlying dermis which results in frequent, open and painful blisters by accelerating reepithelialization of these lesions. Polynucleotides or polypeptides, as well as agonists or antagonists of the present invention, could also be used to treat gastric and doudenal ulcers and help heal by scar formation of the mucosal lining and regeneration of glandular mucosa and duodenal mucosal lining more rapidly. Inflammatory bowel diseases, such as Crohn's disease and ulcerative colitis, are diseases, which result in destruction of the mucosal surface of the small or large intestine, respectively. Thus, polynucleotides or polypeptides, as well as agonists or antagonists of the present invention, could be used to promote the resurfacing of the mucosal surface to aid more rapid healing and to prevent progression of inflammatory bowel disease. Treatment with polynucleotides or polypeptides, agonists or antagonists of the present invention, is expected to have a significant effect on the production of mucus throughout the gastrointestinal tract and could be used to protect the intestinal mucosa from injurious substances that are ingested or following surgery. Polynucleotides or polypeptides, as well as agonists or antagonists of the present invention, could be used to treat diseases associate with the under expression.

[0780] Moreover, polynucleotides or polypeptides, as well as agonists or antagonists of the present invention, could be used to prevent and heal damage to the lungs due to various pathological states. Polynucleotides or polypeptides, as well as agonists or antagonists of the present invention, could stimulate proliferation and differentiation and promote the repair of alveoli and brochiolar epithelium to prevent or treat acute or chronic lung damage. For example, emphysema, which results in the progressive loss of aveoli, and inhalation injuries, i.e., resulting from smoke inhalation and burns, that cause necrosis of the bronchiolar epithelium and alveoli could be effectively treated using polynucleotides or polypeptides, agonists or antagonists of the present invention. Also, polynucleotides or polypeptides, as well as agonists or antagonists of the present invention, could be used to stimulate the proliferation of and differentiation of type II pneumocytes, which may help treat or prevent disease such as hyaline membrane diseases, such as infant respiratory distress syndrome and bronchopulmonary displasia, in premature infants.

[0781] Polynucleotides or polypeptides, as well as agonists or antagonists of the present invention, could stimulate the proliferation and differentiation of hepatocytes and, thus, could be used to alleviate or treat liver diseases and pathologies such as fulminant liver failure caused by cirrhosis, liver damage caused by viral hepatitis and toxic substances (i.e., acetaminophen, carbon tetraholoride and other hepatotoxins known in the art).

[0782] In addition, polynucleotides or polypeptides, as well as agonists or antagonists of the present invention, could be used treat or prevent the onset of diabetes mellitus. In patients with newly diagnosed Types I and II diabetes, where some islet cell function remains, polynucleotides or polypeptides, as well as agonists or antagonists of the present invention, could be used to maintain the islet function so as to alleviate, delay or prevent permanent manifestation of the disease. Also, polynucleotides or polypeptides, as well as agonists or antagonists of the present invention, could be used as an auxiliary in islet cell transplantation to improve or promote islet cell function.

[0783] Infectious Disease

[0784] Polynucleotides or polypeptides, as well as agonists or antagonists of the present invention can be used to treat or detect infectious agents. For example, by increasing the immune response, particularly increasing the proliferation and differentiation of B and/or T cells, infectious diseases may be treated. The immune response may be increased by either enhancing an existing immune response, or by initiating a new immune response. Alternatively, polynucleotides or polypeptides, as well as agonists or antagonists of the present invention may also directly inhibit the infectious agent, without necessarily eliciting an immune response.

[0785] Viruses are one example of an infectious agent that can cause disease or symptoms that can be treated or detected by a polynucleotide or polypeptide and/or agonist or antagonist of the present invention. Examples of viruses, include, but are not limited to Examples of viruses, include, but are not limited to the following DNA and RNA viruses and viral families: Arbovirus, Adenoviridae, Arenaviridae, Arterivirus, Birnaviridae, Bunyaviridae, Caliciviridae, Circoviridae, Coronaviridae, Dengue, EBV, HIV, Flaviviridae, Hepadnaviridae (Hepatitis), Herpesviridae (such as, Cytomegalovirus, Herpes Simplex, Herpes Zoster), Mononegavirus (e.g., Paramyxoviridae, Morbillivirus, Rhabdoviridae), Orthomyxoviridae (e.g., Influenza A, Influenza B, and parainfluenza), Papiloma virus, Papovaviridae, Parvoviridae, Picornaviridae, Poxviridae (such as Smallpox or Vaccinia), Reoviridae (e.g., Rotavirus), Retroviridae (HTLV-I, HTLV-II, Lentivirus), and Togaviridae (e.g., Rubivirus). Viruses falling within these families can cause a variety of diseases or symptoms, including, but not limited to: arthritis, bronchiollitis, respiratory syncytial virus, encephalitis, eye infections (e.g., conjunctivitis, keratitis), chronic fatigue syndrome, hepatitis (A, B, C, E, Chronic Active, Delta), Japanese B encephalitis, Junin, Chikungunya, Rift Valley fever, yellow fever, meningitis, opportunistic infections (e.g., AIDS), pneumonia, Burkitt's Lymphoma, chickenpox, hemorrhagic fever, Measles, Mumps, Parainfluenza, Rabies, the common cold, Polio, leukemia, Rubella, sexually transmitted diseases, skin diseases (e.g., Kaposi's, warts), and viremia. polynucleotides or polypeptides, or agonists or antagonists of the invention, can be used to treat or detect any of these symptoms or diseases. In specific embodiments, polynucleotides, polypeptides, or agonists or antagonists of the invention are used to treat: meningitis, Dengue, EBV, and/or hepatitis (e.g., hepatitis B). In an additional specific embodiment polynucleotides, polypeptides, or agonists or antagonists of the invention are used to treat patients nonresponsive to one or more other commercially available hepatitis vaccines. In a further specific embodiment polynucleotides, polypeptides, or agonists or antagonists of the invention are used to treat AIDS.

[0786] Similarly, bacterial or fungal agents that can cause disease or symptoms and that can be treated or detected by a polynucleotide or polypeptide and/or agonist or antagonist of the present invention include, but not limited to, include, but not limited to, the following Gram-Negative and Gram-positive bacteria and bacterial families and fungi: Actinomycetales (e.g., Corynebacterium, Mycobacterium, Norcardia), Cryptococcus neoformans, Aspergillosis, Bacillaceae (e.g., Anthrax, Clostridium), Bacteroidaceae, Blastomycosis, Bordetella, Borrelia (e.g., Borrelia burgdorferi, Brucellosis, Candidiasis, Campylobacter, Coccidioidomycosis, Cryptococcosis, Dermatocycoses, E. coli (e.g., Enterotoxigenic E. coli and Enterohemorrhagic E. coli), Enterobacteriaceae (Klebsiella, Salmonella (e.g., Salmonella typhi, and Salmonella paratyphi), Serratia, Yersinia), Erysipelothrix, Helicobacter, Legionellosis, Leptospirosis, Listeria, Mycoplasmatales, Mycobacterium leprae, Vibrio cholerae, Neisseriaceae (e.g., Acinetobacter, Gonorrhea, Menigococcal), Meisseria meningitidis, Pasteurellacea Infections (e.g., Actinobacillus, Heamophilus (e.g., Heamophilus influenza type B), Pasteurella), Pseudomonas, Rickettsiaceae, Chlamydiaceae, Treponema spp., Leptospira spp., Shigella spp., Staphylococcal, Meningiococcal, Pneumococcal and Streptococcal (e.g., Streptococcus pneumoniae and Group B Streptococcus). These bacterial or fungal families can cause the following diseases or symptoms, including, but not limited to: bacteremia, endocarditis, eye infections (conjunctivitis, tuberculosis, uveitis), gingivitis, opportunistic infections (e.g., AIDS related infections), paronychia, prosthesis-related infections, Reiter's Disease, respiratory tract infections, such as Whooping Cough or Empyema, sepsis, Lyme Disease, Cat-Scratch Disease, Dysentery, Paratyphoid Fever, food poisoning, Typhoid, pneumonia, Gonorrhea, meningitis (e.g., mengitis types A and B), Chlamydia, Syphilis, Diphtheria, Leprosy, Paratuberculosis, Tuberculosis, Lupus, Botulism, gangrene, tetanus, impetigo, Rheumatic Fever, Scarlet Fever, sexually transmitted diseases, skin diseases (e.g., cellulitis, dermatocycoses), toxemia, urinary tract infections, wound infections. Polynucleotides or polypeptides, agonists or antagonists of the invention, can be used to treat or detect any of these symptoms or diseases. In specific embodiments, Ppolynucleotides, polypeptides, agonists or antagonists of the invention are used to treat: tetanus, Diptheria, botulism, and/or meningitis type B.

[0787] Moreover, parasitic agents causing disease or symptoms that can be treated or detected by a polynucleotide or polypeptide and/or agonist or antagonist of the present invention include, but not limited to, the following families or class: Amebiasis, Babesiosis, Coccidiosis, Cryptosporidiosis, Dientamoebiasis, Dourine, Ectoparasitic, Giardiasis, Helminthiasis, Leishmaniasis, Theileriasis, Toxoplasmosis, Trypanosomiasis, and Trichomonas and Sporozoans (e.g., Plasmodium virax, Plasmodium falciparium, Plasmodium malariae and Plasmodium ovale). These parasites can cause a variety of diseases or symptoms, including, but not limited to: Scabies, Trombiculiasis, eye infections, intestinal disease (e.g., dysentery, giardiasis), liver disease, lung disease, opportunistic infections (e.g., AIDS related), malaria, pregnancy complications, and toxoplasmosis. polynucleotides or polypeptides, or agonists or antagonists of the invention, can be used to treat or detect any of these symptoms or diseases.

[0788] Polynucleotides or polypeptides, as well as agonists or antagonists of the present invention of the present invention could either be by administering an effective amount of a polypeptide to the patient, or by removing cells from the patient, supplying the cells with a polynucleotide of the present invention, and returning the engineered cells to the patient (ex vivo therapy). Moreover, the polypeptide or polynucleotide of the present invention can be used as an antigen in a vaccine to raise an immune response against infectious disease.

[0789] Regeneration

[0790] Polynucleotides or polypeptides, as well as agonists or antagonists of the present invention can be used to differentiate, proliferate, and attract cells, leading to the regeneration of tissues. (See, Science 276:59-87 (1997).) The regeneration of tissues could be used to repair, replace, or protect tissue damaged by congenital defects, trauma (wounds, burns, incisions, or ulcers), age, disease (e.g. osteoporosis, osteocarthritis, periodontal disease, liver failure), surgery, including cosmetic plastic surgery, fibrosis, reperfusion injury, or systemic cytokine damage.

[0791] Tissues that could be regenerated using the present invention include organs (e.g., pancreas, liver, intestine, kidney, skin, endothelium), muscle (smooth, skeletal or cardiac), vasculature (including vascular and lymphatics), nervous, hematopoietic, and skeletal (bone, cartilage, tendon, and ligament) tissue. Preferably, regeneration occurs without or decreased scarring. Regeneration also may include angiogenesis.

[0792] Moreover, polynucleotides or polypeptides, as well as agonists or antagonists of the present invention, may increase regeneration of tissues difficult to heal. For example, increased tendon/ligament regeneration would quicken recovery time after damage. Polynucleotides or polypeptides, as well as agonists or antagonists of the present invention could also be used prophylactically in an effort to avoid damage. Specific diseases that could be treated include of tendinitis, carpal tunnel syndrome, and other tendon or ligament defects. A further example of tissue regeneration of non-healing wounds includes pressure ulcers, ulcers associated with vascular insufficiency, surgical, and traumatic wounds.

[0793] Similarly, nerve and brain tissue could also be regenerated by using polynucleotides or polypeptides, as well as agonists or antagonists of the present invention, to proliferate and differentiate nerve cells. Diseases that could be treated using this method include central and peripheral nervous system diseases, neuropathies, or mechanical and traumatic disorders (e.g., spinal cord disorders, head trauma, cerebrovascular disease, and stoke). Specifically, diseases associated with peripheral nerve injuries, peripheral neuropathy (e.g., resulting from chemotherapy or other medical therapies), localized neuropathies, and central nervous system diseases (e.g., Alzheimer's disease, Parkinson's disease, Huntington's disease, amyotrophic lateral sclerosis, and Shy-Drager syndrome), could all be treated using the polynucleotides or polypeptides, as well as agonists or antagonists of the present invention.

[0794] Chemotaxis

[0795] Polynucleotides or polypeptides, as well as agonists or antagonists of the present invention may have chemotaxis activity. A chemotaxic molecule attracts or mobilizes cells (e.g., monocytes, fibroblasts, neutrophils, T-cells, mast cells, eosinophils, epithelial and/or endothelial cells) to a particular site in the body, such as inflammation, infection, or site of hyperproliferation. The mobilized cells can then fight off and/or heal the particular trauma or abnormality.

[0796] Polynucleotides or polypeptides, as well as agonists or antagonists of the present invention may increase chemotaxic activity of particular cells. These chemotactic molecules can then be used to treat inflammation, infection, hyperproliferative disorders, or any immune system disorder by increasing the number of cells targeted to a particular location in the body. For example, chemotaxic molecules can be used to treat wounds and other trauma to tissues by attracting immune cells to the injured location. Chemotactic molecules of the present invention can also attract fibroblasts, which can be used to treat wounds.

[0797] It is also contemplated that polynucleotides or polypeptides, as well as agonists or antagonists of the present invention may inhibit chemotactic activity. These molecules could also be used to treat disorders. Thus, polynucleotides or polypeptides, as well as agonists or antagonists of the present invention could be used as an inhibitor of chemotaxis.

[0798] Binding Activity

[0799] A polypeptide of the present invention may be used to screen for molecules that bind to the polypeptide or for molecules to which the polypeptide binds. The binding of the polypeptide and the molecule may activate (agonist), increase, inhibit (antagonist), or decrease activity of the polypeptide or the molecule bound. Examples of such molecules include antibodies, oligonucleotides, proteins (e.g., receptors), or small molecules.

[0800] Preferably, the molecule is closely related to the natural ligand of the polypeptide, e.g., a fragment of the ligand, or a natural substrate, a ligand, a structural or functional mimetic. (See, Coligan et al., Current Protocols in Immunology 1(2):Chapter 5 (1991).) Similarly, the molecule can be closely related to the natural receptor to which the polypeptide binds, or at least, a fragment of the receptor capable of being bound by the polypeptide (e.g., active site). In either case, the molecule can be rationally designed using known techniques.

[0801] Preferably, the screening for these molecules involves producing appropriate cells which express the polypeptide. Preferred cells include cells from mammals, yeast, Drosophila, or E. coli. Cells expressing the polypeptide (or cell membrane containing the expressed polypeptide) are then preferably contacted with a test compound potentially containing the molecule to observe binding, stimulation, or inhibition of activity of either the polypeptide or the molecule.

[0802] The assay may simply test binding of a candidate compound to the polypeptide, wherein binding is detected by a label, or in an assay involving competition with a labeled competitor. Further, the assay may test whether the candidate compound results in a signal generated by binding to the polypeptide.

[0803] Alternatively, the assay can be carried out using cell-free preparations, polypeptide/molecule affixed to a solid support, chemical libraries, or natural product mixtures. The assay may also simply comprise the steps of mixing a candidate compound with a solution containing a polypeptide, measuring polypeptide/molecule activity or binding, and comparing the polypeptide/molecule activity or binding to a standard.

[0804] Preferably, an ELISA assay can measure polypeptide level or activity in a sample (e.g., biological sample) using a monoclonal or polyclonal antibody. The antibody can measure polypeptide level or activity by either binding, directly or indirectly, to the polypeptide or by competing with the polypeptide for a substrate.

[0805] Additionally, the receptor to which the polypeptide of the present invention binds can be identified by numerous methods known to those of skill in the art, for example, ligand panning and FACS sorting (Coligan, et al., Current Protocols in Immun., 1(2), Chapter 5, (1991)). For example, expression cloning is employed wherein polyadenylated RNA is prepared from a cell responsive to the polypeptides, for example, NIH3T3 cells which are known to contain multiple receptors for the FGF family proteins, and SC-3 cells, and a cDNA library created from this RNA is divided into pools and used to transfect COS cells or other cells that are not responsive to the polypeptides. Transfected cells which are grown on glass slides are exposed to the polypeptide of the present invention, after they have been labeled. The polypeptides can be labeled by a variety of means including iodination or inclusion of a recognition site for a site-specific protein kinase.

[0806] Following fixation and incubation, the slides are subjected to auto-radiographic analysis. Positive pools are identified and sub-pools are prepared and re-transfected using an iterative sub-pooling and re-screening process, eventually yielding a single clones that encodes the putative receptor.

[0807] As an alternative approach for receptor identification, the labeled polypeptides can be photoaffinity linked with cell membrane or extract preparations that express the receptor molecule. Cross-linked material is resolved by PAGE analysis and exposed to X-ray film. The labeled complex containing the receptors of the polypeptides can be excised, resolved into peptide fragments, and subjected to protein microsequencing. The amino acid sequence obtained from microsequencing would be used to design a set of degenerate oligonucleotide probes to screen a cDNA library to identify the genes encoding the putative receptors.

[0808] Moreover, the techniques of gene-shuffling, motif-shuffling, exon-shuffling, and/or codon-shuffling (collectively referred to as “DNA shuffling”) may be employed to modulate the activities of the polypeptide of the present invention thereby effectively generating agonists and antagonists of the polypeptide of the present invention. See generally, U.S. Pat. Nos. 5,605,793, 5,811,238, 5,830,721, 5,834,252, and 5,837,458, and Patten, P. A., et al., Curr. Opinion Biotechnol. 8:724-33 (1997); Harayama, S. Trends Biotechnol. 16(2):76-82 (1998); Hansson L. O., et al., J. Mol. Biol. 287:265-76 (1999); and Lorenzo, M. M. and Blasco, R. Biotechniques 24(2):308-13 (1998); each of these patents and publications are hereby incorporated by reference). In one embodiment, alteration of polynucleotides and corresponding polypeptides may be achieved by DNA shuffling. DNA shuffling involves the assembly of two or more DNA segments into a desired molecule by homologous, or site-specific, recombination. In another embodiment, polynucleotides and corresponding polypeptides may be altered by being subjected to random mutagenesis by error-prone PCR, random nucleotide insertion or other methods prior to recombination. In another embodiment, one or more components, motifs, sections, parts, domains, fragments, etc., of the polypeptide of the present invention may be recombined with one or more components, motifs, sections, parts, domains, fragments, etc. of one or more heterologous molecules. In preferred embodiments, the heterologous molecules are family members. In further preferred embodiments, the heterologous molecule is a growth factor such as, for example, platelet-derived growth factor (PDGF), insulin-like growth factor (IGF-I), transforming growth factor (TGF)-alpha, epidermal growth factor (EGF), fibroblast growth factor (FGF), TGF-beta, bone morphogenetic protein (BMP)-2, BMP-4, BMP-5, BMP-6, BMP-7, activins A and B, decapentaplegic(dpp), 60A, OP-2, dorsalin, growth differentiation factors (GDFs), nodal, MIS, inhibin-alpha, TGF-beta1, TGF-beta2, TGF-beta3, TGF-beta5, and glial-derived neurotrophic factor (GDNF).

[0809] Other preferred fragments are biologically active fragments of the polypeptide of the present invention. Biologically active fragments are those exhibiting activity similar, but not necessarily identical, to an activity of the polypeptide of the present invention. The biological activity of the fragments may include an improved desired activity, or a decreased undesirable activity.

[0810] Additionally, this invention provides a method of screening compounds to identify those, which modulate the action of the polypeptide of the present invention. An example of such an assay comprises combining a mammalian fibroblast cell, the polypeptide of the present invention, the compound to be screened and ³[H] thymidine under cell culture conditions where the fibroblast cell would normally proliferate. A control assay may be performed in the absence of the compound to be screened and compared to the amount of fibroblast proliferation in the presence of the compound to determine if the compound stimulates proliferation by determining the uptake of ³[H] thymidine in each case. The amount of fibroblast cell proliferation is measured by liquid scintillation chromatography which measures the incorporation of ³[H] thymidine. Both agonist and antagonist compounds may be identified by this procedure.

[0811] In another method, a mammalian cell or membrane preparation expressing a receptor for a polypeptide of the present invention is incubated with a labeled polypeptide of the present invention in the presence of the compound. The ability of the compound to enhance or block this interaction could then be measured. Alternatively, the response of a known second messenger system following interaction of a compound to be screened and the receptor is measured and the ability of the compound to bind to the receptor and elicit a second messenger response is measured to determine if the compound is a potential agonist or antagonist. Such second messenger systems include but are not limited to, cAMP guanylate cyclase, ion channels or phosphoinositide hydrolysis.

[0812] All of these above assays can be used as diagnostic or prognostic markers. The molecules discovered using these assays can be used to treat disease or to bring about a particular result in a patient (e.g., blood vessel growth) by activating or inhibiting the polypeptide/molecule. Moreover, the assays can discover agents which may inhibit or enhance the production of the polypeptides of the invention from suitably manipulated cells or tissues.

[0813] Therefore, the invention includes a method of identifying compounds which bind to a polypeptide of the invention comprising the steps of: (a) incubating a candidate binding compound with a polypeptide of the present invention; and (b) determining if binding has occurred. Moreover, the invention includes a method of identifying agonists/antagonists comprising the steps of: (a) incubating a candidate compound with a polypeptide of the present invention, (b) assaying a biological activity, and (b) determining if a biological activity of the polypeptide has been altered.

[0814] Targeted Delivery

[0815] In another embodiment, the invention provides a method of delivering compositions to targeted cells expressing a receptor for a polypeptide of the invention, or cells expressing a cell bound form of a polypeptide of the invention.

[0816] As discussed herein, polypeptides or antibodies of the invention may be associated with heterologous polypeptides, heterologous nucleic acids, toxins, or prodrugs via hydrophobic, hydrophilic, ionic and/or covalent interactions. In one embodiment, the invention provides a method for the specific delivery of compositions of the invention to cells by administering polypeptides of the invention (including antibodies) that are associated with heterologous polypeptides or nucleic acids. In one example, the invention provides a method for delivering a therapeutic protein into the targeted cell. In another example, the invention provides a method for delivering a single stranded nucleic acid (e.g., antisense or ribozymes) or double stranded nucleic acid (e.g., DNA that can integrate into the cell's genome or replicate episomally and that can be transcribed) into the targeted cell.

[0817] In another embodiment, the invention provides a method for the specific destruction of cells (e.g., the destruction of tumor cells) by administering polypeptides of the invention (e.g., polypeptides of the invention or antibodies of the invention) in association with toxins or cytotoxic prodrugs.

[0818] By “toxin” is meant compounds that bind and activate endogenous cytotoxic effector systems, radioisotopes, holotoxins, modified toxins, catalytic subunits of toxins, or any molecules or enzymes not normally present in or on the surface of a cell that under defined conditions cause the cell's death. Toxins that may be used according to the methods of the invention include, but are not limited to, radioisotopes known in the art, compounds such as, for example, antibodies (or complement fixing containing portions thereof) that bind an inherent or induced endogenous cytotoxic effector system, thymidine kinase, endonuclease, RNAse, alpha toxin, ricin, abrin, Pseudomonas exotoxin A, diphtheria toxin, saporin, momordin, gelonin, pokeweed antiviral protein, alpha-sarcin and cholera toxin. By “cytotoxic prodrug” is meant a non-toxic compound that is converted by an enzyme, normally present in the cell, into a cytotoxic compound. Cytotoxic prodrugs that may be used according to the methods of the invention include, but are not limited to, glutamyl derivatives of benzoic acid mustard alkylating agent, phosphate derivatives of etoposide or mitomycin C, cytosine arabinoside, daunorubisin, and phenoxyacetamide derivatives of doxorubicin.

[0819] Drug Screening

[0820] Further contemplated is the use of the polypeptides of the present invention, or the polynucleotides encoding these polypeptides, to screen for molecules, which modify the activities of the polypeptides of the present invention. Such a method would include contacting the polypeptide of the present invention with a selected compound(s) suspected of having antagonist or agonist activity, and assaying the activity of these polypeptides following binding.

[0821] This invention is particularly useful for screening therapeutic compounds by using the polypeptides of the present invention, or binding fragments thereof, in any of a variety of drug screening techniques. The polypeptide or fragment employed in such a test may be affixed to a solid support, expressed on a cell surface, free in solution, or located intracellularly. One method of drug screening utilizes eukaryotic or prokaryotic host cells which are stably transformed with recombinant nucleic acids expressing the polypeptide or fragment. Drugs are screened against such transformed cells in competitive binding assays. One may measure, for example, the formulation of complexes between the agent being tested and a polypeptide of the present invention.

[0822] Thus, the present invention provides methods of screening for drugs or any other agents, which affect activities mediated by the polypeptides of the present invention. These methods comprise contacting such an agent with a polypeptide of the present invention or a fragment thereof and assaying for the presence of a complex between the agent and the polypeptide or a fragment thereof, by methods well known in the art. In such a competitive binding assay, the agents to screen are typically labeled. Following incubation, free agent is separated from that present in bound form, and the amount of free or uncomplexed label is a measure of the ability of a particular agent to bind to the polypeptides of the present invention.

[0823] Another technique for drug screening provides high throughput screening for compounds having suitable binding affinity to the polypeptides of the present invention, and is described in great detail in European Patent Application 84/03564, published on Sep. 13, 1984, which is incorporated herein by reference herein. Briefly stated, large numbers of different small peptide test compounds are synthesized on a solid substrate, such as plastic pins or some other surface. The peptide test compounds are reacted with polypeptides of the present invention and washed. Bound polypeptides are then detected by methods well known in the art. Purified polypeptides are coated directly onto plates for use in the aforementioned drug screening techniques. In addition, non-neutralizing antibodies may be used to capture the peptide and immobilize it on the solid support.

[0824] This invention also contemplates the use of competitive drug screening assays in which neutralizing antibodies capable of binding polypeptides of the present invention specifically compete with a test compound for binding to the polypeptides or fragments thereof. In this manner, the antibodies are used to detect the presence of any peptide which shares one or more antigenic epitopes with a polypeptide of the invention.

[0825] Antisense and Ribozyme (Antagonists)

[0826] In specific embodiments, antagonists according to the present invention are nucleic acids corresponding to the sequences contained in SEQ ID NO:X, or the complementary strand thereof, and/or to cDNA sequences contained in cDNA Clone ID NO:Z identified for example, in Table 1A. In one embodiment, antisense sequence is generated internally, by the organism, in another embodiment, the antisense sequence is separately administered (see, for example, O'Connor, J., Neurochem. 56:560 (1991). Oligodeoxynucleotides as Antisense Inhibitors of Gene Expression, CRC Press, Boca Raton, Fla. (1988). Antisense technology can be used to control gene expression through antisense DNA or RNA, or through triple-helix formation. Antisense techniques are discussed for example, in Okano, J., Neurochem. 56:560 (1991); Oligodeoxynucleotides as Antisense Inhibitors of Gene Expression, CRC Press, Boca Raton, Fla. (1988). Triple helix formation is discussed in, for instance, Lee et al., Nucleic Acids Research 6:3073 (1979); Cooney et al., Science 241:456 (1988); and Dervan et al., Science 251:1300 (1991). The methods are based on binding of a polynucleotide to a complementary DNA or RNA.

[0827] For example, the use of c-myc and c-myb antisense RNA constructs to inhibit the growth of the non-lymphocytic leukemia cell line HL-60 and other cell lines was previously described. (Wickstrom et al. (1988); Anfossi et al. (1989)). These experiments were performed in vitro by incubating cells with the oligoribonucleotide. A similar procedure for in vivo use is described in WO 91/15580. Briefly, a pair of oligonucleotides for a given antisense RNA is produced as follows: A sequence complimentary to the first 15 bases of the open reading frame is flanked by an EcoR1 site on the 5′ end and a HindIII site on the 3′ end. Next, the pair of oligonucleotides is heated at 90° C. for one minute and then annealed in 2×ligation buffer (20 mM TRIS HCl pH 7.5, 10 mM MgCl2, 10 MM dithiothreitol (DTT) and 0.2 mM ATP) and then ligated to the EcoR1/Hind III site of the retroviral vector PMV7 (WO 91/15580).

[0828] For example, the 5′ coding portion of a polynucleotide that encodes the polypeptide of the present invention may be used to design an antisense RNA oligonucleotide of from about 10 to 40 base pairs in length. A DNA oligonucleotide is designed to be complementary to a region of the gene involved in transcription thereby preventing transcription and the production of the receptor. The antisense RNA oligonucleotide hybridizes to the mRNA in vivo and blocks translation of the mRNA molecule into receptor polypeptide.

[0829] In one embodiment, the antisense nucleic acid of the invention is produced intracellularly by transcription from an exogenous sequence. For example, a vector or a portion thereof, is transcribed, producing an antisense nucleic acid (RNA) of the invention. Such a vector would contain a sequence encoding the antisense nucleic acid. Such a vector can remain episomal or become chromosomally integrated, as long as it can be transcribed to produce the desired antisense RNA. Such vectors can be constructed by recombinant DNA technology methods standard in the art. Vectors can be plasmid, viral, or others known in the art, used for replication and expression in vertebrate cells. Expression of the sequence encoding the polypeptide of the present invention or fragments thereof, can be by any promoter known in the art to act in vertebrate, preferably human cells. Such promoters can be inducible or constitutive. Such promoters include, but are not limited to, the SV40 early promoter region (Bernoist and Chambon, Nature 29:304-310 (1981), the promoter contained in the 3′ long terminal repeat of Rous sarcoma virus (Yamamoto et al., Cell 22:787-797 (1980), the herpes thymidine promoter (Wagner et al., Proc. Natl. Acad. Sci. U.S.A. 78:1441-1445 (1981), the regulatory sequences of the metallothionein gene (Brinster, et al., Nature 296:39-42 (1982)), etc.

[0830] The antisense nucleic acids of the invention comprise a sequence complementary to at least a portion of an RNA transcript of a gene of the present invention. However, absolute complementarity, although preferred, is not required. A sequence “complementary to at least a portion of an RNA,” referred to herein, means a sequence having sufficient complementarity to be able to hybridize with the RNA, forming a stable duplex; in the case of double stranded antisense nucleic acids, a single strand of the duplex DNA may thus be tested, or triplex formation may be assayed. The ability to hybridize will depend on both the degree of complementarity and the length of the antisense nucleic acid. Generally, the larger the hybridizing nucleic acid, the more base mismatches with a RNA it may contain and still form a stable duplex (or triplex as the case may be). One skilled in the art can ascertain a tolerable degree of mismatch by use of standard procedures to determine the melting point of the hybridized complex.

[0831] Oligonucleotides that are complementary to the 5′ end of the message, e.g., the 5′ untranslated sequence up to and including the AUG initiation codon, should work most efficiently at inhibiting translation. However, sequences complementary to the 3′ untranslated sequences of mRNAs have been shown to be effective at inhibiting translation of mRNAs as well. See generally, Wagner, R., 1994, Nature 372:333-335. Thus, oligonucleotides complementary to either the 5′- or 3′-non-translated, non-coding regions of polynucleotide sequences described herein could be used in an antisense approach to inhibit translation of endogenous mRNA. Oligonucleotides complementary to the 5′ untranslated region of the mRNA should include the complement of the AUG start codon. Antisense oligonucleotides complementary to mRNA coding regions are less efficient inhibitors of translation but could be used in accordance with the invention. Whether designed to hybridize to the 5′-, 3′- or coding region of mRNA of the present invention, antisense nucleic acids should be at least six nucleotides in length, and are preferably oligonucleotides ranging from 6 to about 50 nucleotides in length. In specific aspects the oligonucleotide is at least 10 nucleotides, at least 17 nucleotides, at least 25 nucleotides or at least 50 nucleotides.

[0832] The polynucleotides of the invention can be DNA or RNA or chimeric mixtures or derivatives or modified versions thereof, single-stranded or double-stranded. The oligonucleotide can be modified at the base moiety, sugar moiety, or phosphate backbone, for example, to improve stability of the molecule, hybridization, etc. The oligonucleotide may include other appended groups such as peptides (e.g., for targeting host cell receptors in vivo), or agents facilitating transport across the cell membrane (see, e.g., Letsinger et al., 1989, Proc. Natl. Acad. Sci. U.S.A. 86:6553-6556; Lemaitre et al., 1987, Proc. Natl. Acad. Sci. 84:648-652; PCT Publication No. WO88/09810, published Dec. 15, 1988) or the blood-brain barrier (see, e.g., PCT Publication No. WO89/10134, published Apr. 25, 1988), hybridization-triggered cleavage agents. (See, e.g., Krol et al., 1988, BioTechniques 6:958-976) or intercalating agents. (See, e.g., Zon, 1988, Pharm. Res. 5:539-549). To this end, the oligonucleotide may be conjugated to another molecule, e.g., a peptide, hybridization triggered cross-linking agent, transport agent, hybridization-triggered cleavage agent, etc.

[0833] The antisense oligonucleotide may comprise at least one modified base moiety which is selected from the group including, but not limited to, 5-fluorouracil, 5-bromouracil, 5-chlorouracil, 5-iodouracil, hypoxanthine, xantine, 4-acetylcytosine, 5-(carboxyhydroxylmethyl) uracil, 5-carboxymethylaminomethyl-2-thiouridine, 5-carboxymethylaminomethyluracil, dihydrouracil, beta-D-galactosylqueosine, inosine, N6-isopentenyladenine, 1-methylguanine, 1-methylinosine, 2,2-dimethylguanine, 2-methyladenine, 2-methylguanine, 3-methylcytosine, 5-methylcytosine, N6-adenine, 7-methylguanine, 5-methylaminomethyluracil, 5-methoxyaminomethyl-2-thiouracil, beta-D-mannosylqueosine, 5′-methoxycarboxymethyluracil, 5-methoxyuracil, 2-methylthio-N6-isopentenyladenine, uracil-5-oxyacetic acid (v), wybutoxosine, pseudouracil, queosine, 2-thiocytosine, 5-methyl-2-thiouracil, 2-thiouracil, 4-thiouracil, 5-methyluracil, uracil-5-oxyacetic acid methylester, uracil-5-oxyacetic acid (v), 5-methyl-2-thiouracil, 3-(3-amino-3-N-2-carboxypropyl)uracil, (acp3)w, and 2,6-diaminopurine.

[0834] The antisense oligonucleotide may also comprise at least one modified sugar moiety selected from the group including, but not limited to, arabinose, 2-fluoroarabinose, xylulose, and hexose.

[0835] In yet another embodiment, the antisense oligonucleotide comprises at least one modified phosphate backbone selected from the group including, but not limited to, a phosphorothioate, a phosphorodithioate, a phosphoramidothioate, a phosphoramidate, a phosphordiamidate, a methylphosphonate, an alkyl phosphotriester, and a formacetal or analog thereof.

[0836] In yet another embodiment, the antisense oligonucleotide is an a-anomeric oligonucleotide. An a-anomeric oligonucleotide forms specific double-stranded hybrids with complementary RNA in which, contrary to the usual b-units, the strands run parallel to each other (Gautier et al., 1987, Nucl. Acids Res. 15:6625-6641). The oligonucleotide is a 2′-0-methylribonucleotide (Inoue et al., 1987, Nucl. Acids Res. 15:6131-6148), or a chimeric RNA-DNA analogue (Inoue et al., 1987, FEBS Lett. 215:327-330).

[0837] Polynucleotides of the invention may be synthesized by standard methods known in the art, e.g. by use of an automated DNA synthesizer (such as are commercially available from Biosearch, Applied Biosystems, etc.). As examples, phosphorothioate oligonucleotides may be synthesized by the method of Stein et al. (1988, Nucl. Acids Res. 16:3209), methylphosphonate oligonucleotides can be prepared by use of controlled pore glass polymer supports (Sarin et al., 1988, Proc. Natl. Acad. Sci. U.S.A. 85:7448-7451), etc.

[0838] While antisense nucleotides complementary to the coding region sequence could be used, those complementary to the transcribed untranslated region are most preferred.

[0839] Potential antagonists according to the invention also include catalytic RNA, or a ribozyme (See, e.g., PCT International Publication WO 90/11364, published Oct. 4, 1990; Sarver et al, Science 247:1222-1225 (1990). While ribozymes that cleave mRNA at site specific recognition sequences can be used to destroy mRNAs, the use of hammerhead ribozymes is preferred. Hammerhead ribozymes cleave mRNAs at locations dictated by flanking regions that form complementary base pairs with the target mRNA. The sole requirement is that the target mRNA have the following sequence of two bases: 5′-UG-3′. The construction and production of hammerhead ribozymes is well known in the art and is described more fully in Haseloff and Gerlach, Nature 334:585-591 (1988). There are numerous potential hammerhead ribozyme cleavage sites within the nucleotide sequence of SEQ ID NO:X. Preferably, the ribozyme is engineered so that the cleavage recognition site is located near the 5′ end of the mRNA; i.e., to increase efficiency and minimize the intracellular accumulation of non-functional mRNA transcripts.

[0840] As in the antisense approach, the ribozymes of the invention can be composed of modified oligonucleotides (e.g. for improved stability, targeting, etc.) and should be delivered to cells, which express in vivo. DNA constructs encoding the ribozyme may be introduced into the cell in the same manner as described above for the introduction of antisense encoding DNA. A preferred method of delivery involves using a DNA construct “encoding” the ribozyme under the control of a strong constitutive promoter, such as, for example, pol III or pol II promoter, so that transfected cells will produce sufficient quantities of the ribozyme to destroy endogenous messages and inhibit translation. Since ribozymes unlike antisense molecules, are catalytic, a lower intracellular concentration is required for efficiency.

[0841] Antagonist/agonist compounds may be employed to inhibit the cell growth and proliferation effects of the polypeptides of the present invention on neoplastic cells and tissues, i.e. stimulation of angiogenesis of tumors, and, therefore, retard or prevent abnormal cellular growth and proliferation, for example, in tumor formation or growth.

[0842] The antagonist/agonist may also be employed to prevent hyper-vascular diseases, and prevent the proliferation of epithelial lens cells after extracapsular cataract surgery. Prevention of the mitogenic activity of the polypeptides of the present invention may also be desirous in cases such as restenosis after balloon angioplasty.

[0843] The antagonist/agonist may also be employed to prevent the growth of scar tissue during wound healing.

[0844] The antagonist/agonist may also be employed to treat the diseases described herein.

[0845] Thus, the invention provides a method of treating disorders or diseases, including but not limited to the disorders or diseases listed throughout this application, associated with overexpression of a polynucleotide of the present invention by administering to a patient (a) an antisense molecule directed to the polynucleotide of the present invention, and/or (b) a ribozyme directed to the polynucleotide of the present invention.

[0846] Binding Peptides and Other Molecules

[0847] The invention also encompasses screening methods for identifying polypeptides and nonpolypeptides that bind respiratory system antigen polypeptides, and the respiratory system antigen binding molecules identified thereby. These binding molecules are useful, for example, as agonists and antagonists of the respiratory system antigen polypeptides. Such agonists and antagonists can be used, in accordance with the invention, in the therapeutic embodiments described in detail, below.

[0848] This method comprises the steps of:

[0849] contacting respiratory system antigen polypeptides or respiratory system antigen-like polypeptides with a plurality of molecules; and

[0850] identifying a molecule that binds the respiratory system antigen polypeptides or respiratory system antigen-like polypeptides.

[0851] The step of contacting the respiratory system antigen polypeptides or respiratory system antigen-like polypeptides with the plurality of molecules may be effected in a number of ways. For example, one may contemplate immobilizing the respiratory system antigen polypeptides or respiratory system antigen-like polypeptides on a solid support and bringing a solution of the plurality of molecules in contact with the immobilized respiratory system antigen polypeptides or respiratory system antigen-like polypeptides. Such a procedure would be akin to an affinity chromatographic process, with the affinity matrix being comprised of the immobilized respiratory system antigen polypeptides or respiratory system antigen-like polypeptides. The molecules having a selective affinity for the respiratory system antigen polypeptides or respiratory system antigen-like polypeptides can then be purified by affinity selection. The nature of the solid support, process for attachment of the respiratory system antigen polypeptides or respiratory system antigen-like polypeptides to the solid support, solvent, and conditions of the affinity isolation or selection are largely conventional and well known to those of ordinary skill in the art.

[0852] Alternatively, one may also separate a plurality of polypeptides into substantially separate fractions comprising a subset of or individual polypeptides. For instance, one can separate the plurality of polypeptides by gel electrophoresis, column chromatography, or like method known to those of ordinary skill for the separation of polypeptides. The individual polypeptides can also be produced by a transformed host cell in such a way as to be expressed on or about its outer surface (e.g., a recombinant phage). Individual isolates can then be “probed” by the respiratory system antigen polypeptides or respiratory system antigen-like polypeptides, optionally in the presence of an inducer should one be required for expression, to determine if any selective affinity interaction takes place between the respiratory system antigen polypeptides or respiratory system antigen-like polypeptides and the individual clone. Prior to contacting the respiratory system antigen polypeptides or respiratory system antigen-like polypeptides with each fraction comprising individual polypeptides, the polypeptides could first be transferred to a solid support for additional convenience. Such a solid support may simply be a piece of filter membrane, such as one made of nitrocellulose or nylon. In this manner, positive clones could be identified from a collection of transformed host cells of an expression library, which harbor a DNA construct encoding a polypeptide having a selective affinity for respiratory system antigen polypeptides or respiratory system antigen-like polypeptides. Furthermore, the amino acid sequence of the polypeptide having a selective affinity for the respiratory system antigen polypeptides or respiratory system antigen-like polypeptides can be determined directly by conventional means or the coding sequence of the DNA encoding the polypeptide can frequently be determined more conveniently. The primary sequence can then be deduced from the corresponding DNA sequence. If the amino acid sequence is to be determined from the polypeptide itself, one may use microsequencing techniques. The sequencing technique may include mass spectroscopy.

[0853] In certain situations, it may be desirable to wash away any unbound respiratory system antigen polypeptides or respiratory system antigen-like polypeptides, or alternatively, unbound polypeptides, from a mixture of the respiratory system antigen polypeptides or respiratory system antigen-like polypeptides and the plurality of polypeptides prior to attempting to determine or to detect the presence of a selective affinity interaction. Such a wash step may be particularly desirable when the respiratory system antigen polypeptides or respiratory system antigen-like polypeptides or the plurality of polypeptides is bound to a solid support.

[0854] The plurality of molecules provided according to this method may be provided by way of diversity libraries, such as random or combinatorial peptide or nonpeptide libraries which can be screened for molecules that specifically bind respiratory system antigen polypeptides. Many libraries are known in the art that can be used, e.g., chemically synthesized libraries, recombinant (e.g., phage display libraries), and in vitro translation-based libraries. Examples of chemically synthesized libraries are described in Fodor et al., 1991, Science 251:767-773; Houghten et al., 1991, Nature 354:84-86; Lam et al., 1991, Nature 354:82-84; Medynski, 1994, Bio/Technology 12:709-710;Gallop et al., 1994, J. Medicinal Chemistry 37(9):1233-1251; Ohlmeyer et al., 1993, Proc. Natl. Acad. Sci. USA 90:10922-10926; Erb et al., 1994, Proc. Natl. Acad. Sci. USA 91:11422-11426; Houghten et al., 1992, Biotechniques 13:412; Jayawickreme et al., 1994, Proc. Natl. Acad. Sci. USA 91:1614-1618; Salmon et al., 1993, Proc. Natl. Acad. Sci. USA 90:11708-11712; PCT Publication No. WO 93/20242; and Brenner and Lerner, 1992, Proc. Natl. Acad. Sci. USA 89:5381-5383.

[0855] Examples of phage display libraries are described in Scott and Smith, 1990, Science 249:386-390; Devlin et al., 1990, Science, 249:404-406; Christian, R. B., et al., 1992, J. Mol. Biol. 227:711-718); Lenstra, 1992, J. Immunol. Meth. 152:149-157; Kay et al., 1993, Gene 128:59-65; and PCT Publication No. WO 94/18318 dated Aug. 18, 1994.

[0856] In vitro translation-based libraries include but are not limited to those described in PCT Publication No. WO 91/05058 dated Apr. 18, 1991; and Mattheakis et al., 1994, Proc. Natl. Acad. Sci. USA 91:9022-9026.

[0857] By way of examples of nonpeptide libraries, a benzodiazepine library (see e.g., Bunin et al., 1994, Proc. Natl. Acad. Sci. USA 91:4708-4712) can be adapted for use. Peptoid libraries (Simon et al., 1992, Proc. Natl. Acad. Sci. USA 89:9367-9371) can also be used. Another example of a library that can be used, in which the amide functionalities in peptides have been permethylated to generate a chemically transformed combinatorial library, is described by Ostresh et al. (1994, Proc. Natl. Acad. Sci. USA 91:11138-11142).

[0858] The variety of non-peptide libraries that are useful in the present invention is great. For example, Ecker and Crooke, 1995, Bio/Technology 13:351-360 list benzodiazepines, hydantoins, piperazinediones, biphenyls, sugar analogs, beta-mercaptoketones, arylacetic acids, acylpiperidines, benzopyrans, cubanes, xanthines, aminimides, and oxazolones as among the chemical species that form the basis of various libraries.

[0859] Non-peptide libraries can be classified broadly into two types: decorated monomers and oligomers. Decorated monomer libraries employ a relatively simple scaffold structure upon which a variety functional groups is added. Often the scaffold will be a molecule with a known useful pharmacological activity. For example, the scaffold might be the benzodiazepine structure.

[0860] Non-peptide oligomer libraries utilize a large number of monomers that are assembled together in ways that create new shapes that depend on the order of the monomers. Among the monomer units that have been used are carbamates, pyrrolinones, and morpholinos. Peptoids, peptide-like oligomers in which the side chain is attached to the alpha amino group rather than the alpha carbon, form the basis of another version of non-peptide oligomer libraries. The first non-peptide oligomer libraries utilized a single type of monomer and thus contained a repeating backbone. Recent libraries have utilized more than one monomer, giving the libraries added flexibility.

[0861] Screening the libraries can be accomplished by any of a variety of commonly known methods. See, e.g., the following references, which disclose screening of peptide libraries: Parmley and Smith, 1989, Adv. Exp. Med. Biol. 251:215-218; Scott and Smith, 1990, Science 249:386-390; Fowlkes et al., 1992; BioTechniques 13:422-427; Oldenburg et al., 1992, Proc. Natl. Acad. Sci. USA 89:5393-5397; Yu et al., 1994, Cell 76:933-945; Staudt et al., 1988, Science 241:577-580; Bock et al., 1992, Nature 355:564-566; Tuerk et al., 1992, Proc. Natl. Acad. Sci. USA 89:6988-6992; Ellington et al., 1992, Nature 355:850-852; U.S. Pat. Nos. 5,096,815, 5,223,409, and 5,198,346, all to Ladner et al.; Rebar and Pabo, 1993, Science 263:671-673; and CT Publication No. WO 94/18318.

[0862] In a specific embodiment, screening to identify a molecule that binds respiratory system antigen polypeptides can be carried out by contacting the library members with a respiratory system antigen polypeptides or respiratory system antigen-like polypeptides immobilized on a solid phase and harvesting those library members that bind to the respiratory system antigen polypeptides or respiratory system antigen-like polypeptides. Examples of such screening methods, termed “panning” techniques are described by way of example in Parmley and Smith, 1988, Gene 73:305-318; Fowlkes et al., 1992, BioTechniques 13:422-427; International Publication No. WO 94/18318; and in references cited herein.

[0863] In another embodiment, the two-hybrid system for selecting interacting proteins in yeast (Fields and Song, 1989, Nature 340:245-246; Chien et al., 1991, Proc. Natl. Acad. Sci. USA 88:9578-9582) can be used to identify molecules that specifically bind to respiratory system antigen polypeptides or respiratory system antigen-like polypeptides.

[0864] Where the respiratory system antigen binding molecule is a polypeptide, the polypeptide can be conveniently selected from any peptide library, including random peptide libraries, combinatorial peptide libraries, or biased peptide libraries. The term “biased” is used herein to mean that the method of generating the library is manipulated so as to restrict one or more parameters that govern the diversity of the resulting collection of molecules, in this case peptides.

[0865] Thus, a truly random peptide library would generate a collection of peptides in which the probability of finding a particular amino acid at a given position of the peptide is the same for all 20 amino acids. A bias can be introduced into the library, however, by specifying, for example, that a lysine occur every fifth amino acid or that positions 4, 8, and 9 of a decapeptide library be fixed to include only arginine. Clearly, many types of biases can be contemplated, and the present invention is not restricted to any particular bias. Furthermore, the present invention contemplates specific types of peptide libraries, such as phage displayed peptide libraries and those that utilize a DNA construct comprising a lambda phage vector with a DNA insert.

[0866] As mentioned above, in the case of a respiratory system antigen binding molecule that is a polypeptide, the polypeptide may have about 6 to less than about 60 amino acid residues, preferably about 6 to about 10 amino acid residues, and most preferably, about 6 to about 22 amino acids. In another embodiment, a respiratory system antigen binding polypeptide has in the range of 15-100 amino acids, or 20-50 amino acids.

[0867] The selected respiratory system antigen binding polypeptide can be obtained by chemical synthesis or recombinant expression.

[0868] Other Activities

[0869] A polypeptide, polynucleotide, agonist, or antagonist of the present invention, as a result of the ability to stimulate vascular endothelial cell growth, may be employed in treatment for stimulating re-vascularization of ischemic tissues due to various disease conditions such as thrombosis, arteriosclerosis, and other cardiovascular conditions. The polypeptide, polynucleotide, agonist, or antagonist of the present invention may also be employed to stimulate angiogenesis and limb regeneration, as discussed above.

[0870] A polypeptide, polynucleotide, agonist, or antagonist of the present invention may also be employed for treating wounds due to injuries, bums, post-operative tissue repair, and ulcers since they are mitogenic to various cells of different origins, such as fibroblast cells and skeletal muscle cells, and therefore, facilitate the repair or replacement of damaged or diseased tissue.

[0871] A polypeptide, polynucleotide, agonist, or antagonist of the present invention may also be employed to stimulate neuronal growth and to treat and prevent neuronal damage which occurs in certain neuronal disorders or neuro-degenerative conditions such as Alzheimer's disease, Parkinson's disease, and AIDS-related complex. A polypeptide, polynucleotide, agonist, or antagonist of the present invention may have the ability to stimulate chondrocyte growth; therefore, they may be employed to enhance bone and periodontal regeneration and aid in tissue transplants or bone grafts.

[0872] A polypeptide, polynucleotide, agonist, or antagonist of the present invention may be also be employed to prevent skin aging due to sunburn by stimulating keratinocyte growth.

[0873] A polypeptide, polynucleotide, agonist, or antagonist of the present invention may also be employed for preventing hair loss, since FGF family members activate hair-forming cells and promotes melanocyte growth. Along the same lines, a polypeptide, polynucleotide, agonist, or antagonist of the present invention may be employed to stimulate growth and differentiation of hematopoietic cells and bone marrow cells when used in combination with other cytokines.

[0874] A polypeptide, polynucleotide, agonist, or antagonist of the present invention may also be employed to maintain organs before transplantation or for supporting cell culture of primary tissues. A polypeptide, polynucleotide, agonist, or antagonist of the present invention may also be employed for inducing tissue of mesodermal origin to differentiate in early embryos.

[0875] A polypeptide, polynucleotide, agonist, or antagonist of the present invention may also increase or decrease the differentiation or proliferation of embryonic stem cells, besides, as discussed above, hematopoietic lineage.

[0876] A polypeptide, polynucleotide, agonist, or antagonist of the present invention may also be used to modulate mammalian characteristics, such as body height, weight, hair color, eye color, skin, percentage of adipose tissue, pigmentation, size, and shape (e.g., cosmetic surgery). Similarly, a polypeptide, polynucleotide, agonist, or antagonist of the present invention may be used to modulate mammalian metabolism affecting catabolism, anabolism, processing, utilization, and storage of energy.

[0877] A polypeptide, polynucleotide, agonist, or antagonist of the present invention may be used to change a mammal's mental state or physical state by influencing biorhythms, caricadic rhythms, depression (including depressive disorders), tendency for violence, tolerance for pain, reproductive capabilities (preferably by Activin or Inhibin-like activity), hormonal or endocrine levels, appetite, libido, memory, stress, or other cognitive qualities.

[0878] A polypeptide, polynucleotide, agonist, or antagonist of the present invention may also be used as a food additive or preservative, such as to increase or decrease storage capabilities, fat content, lipid, protein, carbohydrate, vitamins, minerals, cofactors or other nutritional components.

[0879] The above-recited applications have uses in a wide variety of hosts. Such hosts include, but are not limited to, human, murine, rabbit, goat, guinea pig, camel, horse, mouse, rat, hamster, pig, micro-pig, chicken, goat, cow, sheep, dog, cat, non-human primate, and human. In specific embodiments, the host is a mouse, rabbit, goat, guinea pig, chicken, rat, hamster, pig, sheep, dog or cat. In preferred embodiments, the host is a mammal. In most preferred embodiments, the host is a human.

[0880] Other Preferred Embodiments

[0881] Other preferred embodiments of the claimed invention include an isolated nucleic acid molecule comprising a nucleotide sequence which is at least 95% identical to a sequence of at least about 50 contiguous nucleotides in the nucleotide sequence of SEQ ID NO:X or the complementary strand thereto, the nucleotide sequence as defined in column 4 of Table 1A or columns 8 and 9 of Table 2 or the complementary strand thereto, and/or cDNA contained in Clone ID NO:Z.

[0882] Also preferred is a nucleic acid molecule wherein said sequence of contiguous nucleotides is included in the nucleotide sequence of the portion of SEQ ID NO:X as defined in column 4, “ORF (From-To)”, in Table 1A.

[0883] Also preferred is a nucleic acid molecule wherein said sequence of contiguous nucleotides is included in the nucleotide sequence of the portion of SEQ ID NO:X as defined in columns 8 and 9, “NT From” and “NT To” respectively, in Table 2.

[0884] Also preferred is an isolated nucleic acid molecule comprising a nucleotide sequence which is at least 95% identical to a sequence of at least about 150 contiguous nucleotides in the nucleotide sequence of SEQ ID NO:X or the complementary strand thereto, the nucleotide sequence as defined in column 4 of Table 1A or columns 8 and 9 of Table 2 or the complementary strand thereto, and/or cDNA contained in Clone ID NO:Z.

[0885] Further preferred is an isolated nucleic acid molecule comprising a nucleotide sequence which is at least 95% identical to a sequence of at least about 500 contiguous nucleotides in the nucleotide sequence of SEQ ID NO:X or the complementary strand thereto, the nucleotide sequence as defined in column 4 of Table 1A or columns 8 and 9 of Table 2 or the complementary strand thereto, and/or cDNA contained in Clone ID NO:Z.

[0886] A further preferred embodiment is a nucleic acid molecule comprising a nucleotide sequence which is at least 95% identical to the nucleotide sequence of the portion of SEQ ID NO:X defined in column 4, “ORF (From-To)”, in Table 1A.

[0887] A further preferred embodiment is a nucleic acid molecule comprising a nucleotide sequence which is at least 95% identical to the nucleotide sequence of the portion of SEQ ID NO:X defined in columns 8 and 9, “NT From” and “NT To”, respectively, in Table 2.

[0888] A further preferred embodiment is an isolated nucleic acid molecule comprising a nucleotide sequence which is at least 95% identical to the complete nucleotide sequence of SEQ ID NO:X or the complementary strand thereto, the nucleotide sequence as defined in column 4 of Table 1A or columns 8 and 9 of Table 2 or the complementary strand thereto, and/or cDNA contained in Clone ID NO:Z.

[0889] Also preferred is an isolated nucleic acid molecule which hybridizes under stringent hybridization conditions to a nucleic acid molecule comprising a nucleotide sequence of SEQ ID NO:X or the complementary strand thereto, the nucleotide sequence as defined in column 4 of Table 1A or columns 8 and 9 of Table 2 or the complementary strand thereto, and/or cDNA contained in Clone ID NO:Z, wherein said nucleic acid molecule which hybridizes does not hybridize under stringent hybridization conditions to a nucleic acid molecule having a nucleotide sequence consisting of only A residues or of only T residues.

[0890] Also prefer d is a composition of matter comprising a DNA molecule which comprises the cDNA cotained in Clone ID NO:Z.

[0891] Also preferred is an isolated nucleic acid molecule comprising a nucleotide sequence which is at least 95% identical to a sequence of at least 50 contiguous nucleotides of the cDNA sequence contained in Clone ID NO:Z.

[0892] Also prefered is an isolated nucleic acid molecule, wherein said sequence of at least 50 contiguous nucleotides is included in the nucleotide sequence of an open reading frame sequence encoded by cDNA contained in Clone ID NO:Z.

[0893] Also preferred is an isolated nucleic acid molecule comprising a nucleotide sequence which is at least 95% identical to sequence of at least 150 contiguous nucleotides in the nucleotide sequence encoded by cDNA contained in Clone ID NO:Z.

[0894] A further preferred embodiment is an isolated nucleic acid molecule comprising a nucleotide sequence which is at least 95% identical to sequence of at least 500 contiguous nucleotides in the nucleotide sequence encoded by cDNA contained in Clone ID NO:Z.

[0895] A further preferred embodiment is an isolated nucleic acid molecule comprising a nucleotide sequence which is at least 95% identical to the complete nucleotide sequence encoded by cDNA contained in Clone ID NO:Z.

[0896] A further preferred embodiment is a method for detecting in a biological sample a nucleic acid molecule comprising a nucleotide sequence which is at least 95% identical to a sequence of at least 50 contiguous nucleotides in a sequence selected from the group consisting of: a nucleotide sequence of SEQ ID NO:X or the complementary strand thereto; the nucleotide sequence as defined in column 4 of Table 1A or columns 8 and 9 of Table 2 or the complementary strand thereto; and a nucleotide sequence encoded by cDNA contained in Clone ID NO:Z; which method comprises a step of comparing a nucleotide sequence of at least one nucleic acid molecule in said sample with a sequence selected from said group and determining whether the sequence of said nucleic acid molecule in said sample is at least 95% identical to said selected sequence.

[0897] Also preferred is the above method wherein said step of comparing sequences comprises determining the extent of nucleic acid hybridization between nucleic acid molecules in said sample and a nucleic acid molecule comprising said sequence selected from said group. Similarly, also preferred is the above method wherein said step of comparing sequences is performed by comparing the nucleotide sequence determined from a nucleic acid molecule in said sample with said sequence selected from said group. The nucleic acid molecules can comprise DNA molecules or RNA molecules.

[0898] A further preferred embodiment is a method for identifying the species, tissue or cell type of a biological sample which method comprises a step of detecting nucleic acid molecules in said sample, if any, comprising a nucleotide sequence that is at least 95% identical to a sequence of at least 50 contiguous nucleotides in a sequence selected from the group consisting of: a nucleotide sequence of SEQ ID NO:X or the complementary strand thereto; the nucleotide sequence as defined in column 4 of Table 1A or columns 8 and 9 of Table 2 or the complementary strand thereto; and a nucleotide sequence of the cDNA contained in Clone ID NO:Z.

[0899] The method for identifying the species, tissue or cell type of a biological sample can comprise a step of detecting nucleic acid molecules comprising a nucleotide sequence in a panel of at least two nucleotide sequences, wherein at least one sequence in said panel is at least 95% identical to a sequence of at least 50 contiguous nucleotides in a sequence selected from said group.

[0900] Also preferred is a method for diagnosing in a subject a pathological condition associated with abnormal structure or expression of a nucleotide sequence of SEQ ID NO:X or the complementary strand thereto; the nucleotide sequence as defined in column 4 of Table 1A or columns 8 and 9 of Table 2 or the complementary strand thereto; or the cDNA contained in Clone ID NO:Z which encodes a protein, wherein the method comprises a step of detecting in a biological sample obtained from said subject nucleic acid molecules, if any, comprising a nucleotide sequence that is at least 95% identical to a sequence of at least 50 contiguous nucleotides in a sequence selected from the group consisting of: a nucleotide sequence of SEQ ID NO:X or the complementary strand thereto; the nucleotide sequence as defined in column 4 of Table 1A or columns 8 and 9 of Table 2 or the complementary strand thereto; and a nucleotide sequence of cDNA contained in Clone ID NO:Z.

[0901] The method for diagnosing a pathological condition can comprise a step of detecting nucleic acid molecules comprising a nucleotide sequence in a panel of at least two nucleotide sequences, wherein at least one sequence in said panel is at least 95% identical to a sequence of at least 50 contiguous nucleotides in a sequence selected from said group.

[0902] Also preferred is a composition of matter comprising isolated nucleic acid molecules wherein the nucleotide sequences of said nucleic acid molecules comprise a panel of at least two nucleotide sequences, wherein at least one sequence in said panel is at least 95% identical to a sequence of at least 50 contiguous nucleotides in a sequence selected from the group consisting of: a nucleotide sequence of SEQ ID NO:X or the complementary strand thereto; the nucleotide sequence as defined in column 4 of Table 1A or columns 8 and 9 of Table 2 or the complementary strand thereto; and a nucleotide sequence encoded by cDNA contained in Clone ID NO:Z. The nucleic acid molecules can comprise DNA molecules or RNA molecules.

[0903] Also preferred is a composition of matter comprising isolated nucleic acid molecules wherein the nucleotide sequences of said nucleic acid molecules comprise a DNA microarray or “chip” of at least 1, 2, 3, 4, 5, 6, 7, 8, 9, 10, 15, 20, 25, 30, 40, 50, 100, 150, 200, 250, 300, 500, 1000, 2000, 3000, or 4000 nucleotide sequences, wherein at least one sequence in said DNA microarray or “chip” is at least 95% identical to a sequence of at least 50 contiguous nucleotides in a sequence selected from the group consisting of: a nucleotide sequence of SEQ ID NO:X wherein X is any integer as defined in Table 1A; and a nucleotide sequence encoded by a human cDNA clone identified by a cDNA “Clone ID” in Table 1A.

[0904] Also preferred is an isolated polypeptide comprising an amino acid sequence at least 90% identical to a sequence of at least about 10 contiguous amino acids in the polypeptide sequence of SEQ ID NO:Y; a polypeptide encoded by SEQ ID NO:X or the complementary strand thereto; the polypeptide encoded by the nucleotide sequence as defined in columns 8 and 9 of Table 2; and/or a polypeptide encoded by cDNA contained in Clone ID NO:Z.

[0905] Also preferred is an isolated polypeptide comprising an amino acid sequence at least 95% identical to a sequence of at least about 30 contiguous amino acids in the amino acid sequence of SEQ ID NO:Y; a polypeptide encoded by SEQ ID NO:X or the complementary strand thereto; the polypeptide encoded by the nucleotide sequence as defined in columns 8 and 9 of Table 2; and/or a polypeptide encoded by cDNA contained in Clone ID NO:Z.

[0906] Further preferred is an isolated polypeptide comprising an amino acid sequence at least 95% identical to a sequence of at least about 100 contiguous amino acids in the amino acid sequence of SEQ ID NO:Y; a polypeptide encoded by SEQ ID NO:X or the complementary strand thereto; the polypeptide encoded by the nucleotide sequence as defined in columns 8 and 9 of Table 2; and/or a polypeptide encoded by cDNA contained in Clone ID NO:Z.

[0907] Further preferred is an isolated polypeptide comprising an amino acid sequence at least 95% identical to the complete amino acid sequence of SEQ ID NO:Y; a polypeptide encoded by SEQ ID NO:X or the complementary strand thereto; the polypeptide encoded by the nucleotide sequence as defined in columns 8 and 9 of Table 2; and/or a polypeptide encoded by cDNA contained in Clone ID NO:Z.

[0908] Further preferred is an isolated polypeptide comprising an amino acid sequence at least 90% identical to a sequence of at least about 10 contiguous amino acids in the complete amino acid sequence of a polypeptide encoded by contained in Clone ID NO:Z

[0909] Also preferred is a polypeptide wherein said sequence of contiguous amino acids is included in the amino acid sequence of a portion of said polypeptide encoded by cDNA contained in Clone ID NO:Z; a polypeptide encoded by SEQ ID NO:X or the complementary strand thereto; the polypeptide encoded by the nucleotide sequence as defined in columns 8 and 9 of Table 2; and/or the polypeptide sequence of SEQ ID NO:Y.

[0910] Also preferred is an isolated polypeptide comprising an amino acid sequence at least 95% identical to a sequence of at least about 30 contiguous amino acids in the amino acid sequence of a polypeptide encoded by the cDNA contained in Clone ID NO:Z.

[0911] Also preferred is an isolated polypeptide comprising an amino acid sequence at least 95% identical to a sequence of at least about 100 contiguous amino acids in the amino acid sequence of a polypeptide encoded by cDNA contained in Clone ID NO:Z.

[0912] Also preferred is an isolated polypeptide comprising an amino acid sequence at least 95% identical to the amino acid sequence of a polypeptide encoded by the cDNA contained in Clone ID NO:Z.

[0913] Further preferred is an isolated antibody which binds specifically to a polypeptide comprising an amino acid sequence that is at least 90% identical to a sequence of at least 10 contiguous amino acids in a sequence selected from the group consisting of: a polypeptide sequence of SEQ ID NO:Y; a polypeptide encoded by SEQ ID NO:X or the complementary strand thereto; the polypeptide encoded by the nucleotide sequence as defined in columns 8 and 9 of Table 2; and a polypeptide encoded by the cDNA contained in Clone ID NO:Z.

[0914] Further preferred is a method for detecting in a biological sample a polypeptide comprising an amino acid sequence which is at least 90% identical to a sequence of at least 10 contiguous amino acids in a sequence selected from the group consisting of: a polypeptide sequence of SEQ ID NO:Y; a polypeptide encoded by SEQ ID NO:X or the complementary strand thereto; the polypeptide encoded by the nucleotide sequence as defined in columns 8 and 9 of Table 2; and a polypeptide encoded by the cDNA contained in Clone ID NO:Z; which method comprises a step of comparing an amino acid sequence of at least one polypeptide molecule in said sample with a sequence selected from said group and determining whether the sequence of said polypeptide molecule in said sample is at least 90% identical to said sequence of at least 10 contiguous amino acids.

[0915] Also preferred is the above method wherein said step of comparing an amino acid sequence of at least one polypeptide molecule in said sample with a sequence selected from said group comprises determining the extent of specific binding of polypeptides in said sample to an antibody which binds specifically to a polypeptide comprising an amino acid sequence that is at least 90% identical to a sequence of at least 10 contiguous amino acids in a sequence selected from the group consisting of: a polypeptide sequence of SEQ ID NO:Y; a polypeptide encoded by SEQ ID NO:X or the complementary strand thereto; the polypeptide encoded by the nucleotide sequence as defined in columns 8 and 9 of Table 2; and a polypeptide encoded by the cDNA contained in Clone ID NO:Z.

[0916] Also preferred is the above method wherein said step of comparing sequences is performed by comparing the amino acid sequence determined from a polypeptide molecule in said sample with said sequence selected from said group.

[0917] Also preferred is a method for identifying the species, tissue or cell type of a biological sample which method comprises a step of detecting polypeptide molecules in said sample, if any, comprising an amino acid sequence that is at least 90% identical to a sequence of at least 10 contiguous amino acids in a sequence selected from the group consisting of: polypeptide sequence of SEQ ID NO:Y; a polypeptide encoded by SEQ ID NO:X or the complementary strand thereto; the polypeptide encoded by the nucleotide sequence as defined in columns 8 and 9 of Table 2; and a polypeptide encoded by the cDNA contained in Clone ID NO:Z.

[0918] Also preferred is the above method for identifying the species, tissue or cell type of a biological sample, which method comprises a step of detecting polypeptide molecules comprising an amino acid sequence in a panel of at least two amino acid sequences, wherein at least one sequence in said panel is at least 90% identical to a sequence of at least 10 contiguous amino acids in a sequence selected from the above group.

[0919] Also preferred is a method for diagnosing in a subject a pathological condition associated with abnormal structure or expression of a nucleic acid sequence identified in Table 1A or Table 2 encoding a polypeptide, which method comprises a step of detecting in a biological sample obtained from said subject polypeptide molecules comprising an amino acid sequence in a panel of at least two amino acid sequences, wherein at least one sequence in said panel is at least 90% identical to a sequence of at least 10 contiguous amino acids in a sequence selected from the group consisting of: polypeptide sequence of SEQ ID NO:Y; a polypeptide encoded by SEQ ID NO:X or the complementary strand thereto; the polypeptide encoded by the nucleotide sequence as defined in columns 8 and 9 of Table 2; and a polypeptide encoded by the cDNA contained in Clone ID NO:Z.

[0920] In any of these methods, the step of detecting said polypeptide molecules includes using an antibody.

[0921] Also preferred is an isolated nucleic acid molecule comprising a nucleotide sequence which is at least 95% identical to a nucleotide sequence encoding a polypeptide wherein said polypeptide comprises an amino acid sequence that is at least 90% identical to a sequence of at least 10 contiguous amino acids in a sequence selected from the group consisting of: polypeptide sequence of SEQ ID NO:Y; a polypeptide encoded by SEQ ID NO:X or the complementary strand thereto; the polypeptide encoded by the nucleotide sequence as defined in columns 8 and 9 of Table 2; and a polypeptide encoded by the cDNA contained in Clone ID NO:Z.

[0922] Also preferred is an isolated nucleic acid molecule, wherein said nucleotide sequence encoding a polypeptide has been optimized for expression of said polypeptide in a prokaryotic host.

[0923] Also preferred is a polypeptide molecule, wherein said polypeptide comprises an amino acid sequence selected from the group consisting of: polypeptide sequence of SEQ ID NO:Y; a polypeptide encoded by SEQ ID NO:X or the complementary strand thereto; the polypeptide encoded by the nucleotide sequence as defined in columns 8 and 9 of Table 2; and a polypeptide encoded by the cDNA contained in Clone ID NO:Z.

[0924] Further preferred is a method of making a recombinant vector comprising inserting any of the above isolated nucleic acid molecule into a vector. Also preferred is the recombinant vector produced by this method. Also preferred is a method of making a recombinant host cell comprising introducing the vector into a host cell, as well as the recombinant host cell produced by this method.

[0925] Also preferred is a method of making an isolated polypeptide comprising culturing this recombinant host cell under conditions such that said polypeptide is expressed and recovering said polypeptide. Also preferred is this method of making an isolated polypeptide, wherein said recombinant host cell is a eukaryotic cell and said polypeptide is a human protein comprising an amino acid sequence selected from the group consisting of: polypeptide sequence of SEQ ID NO:Y; a polypeptide encoded by SEQ ID NO:X or the complementary strand thereto; the polypeptide encoded by the nucleotide sequence as defined in columns 8 and 9 of Table 2; and a polypeptide encoded by the cDNA contained in Clone ID NO:Z. The isolated polypeptide produced by this method is also preferred.

[0926] Also preferred is a method of treatment of an individual in need of an increased level of a protein activity, which method comprises administering to such an individual a Therapeutic comprising an amount of an isolated polypeptide, polynucleotide, immunogenic fragment or analogue thereof, binding agent, antibody, or antigen binding fragment of the claimed invention effective to increase the level of said protein activity in said individual.

[0927] Also preferred is a method of treatment of an individual in need of a decreased level of a protein activity, which method comprised administering to such an individual a Therapeutic comprising an amount of an isolated polypeptide, polynucleotide, immunogenic fragment or analogue thereof, binding agent, antibody, or antigen binding fragment of the claimed invention effective to decrease the level of said protein activity in said individual.

[0928] Also preferred is a method of treatment of an individual in need of a specific delivery of toxic compositions to diseased cells (e.g., tumors, leukemias or lymphomas), which method comprises administering to such an individual a Therapeutic comprising an amount of an isolated polypeptide of the invention, including, but not limited to a binding agent, or antibody of the claimed invention that are associated with toxin or cytotoxic prodrugs.

[0929] Having generally described the invention, the same will be more readily understood by reference to the following examples, which are provided by way of illustration and are not intended as limiting.

TABLE 6

| ATCC Deposits | Deposit Date | ATCC Designation Number |
|---|---|---|
| LP01, LP02, LP03, | May-20-97 | 209059, 209060, 209061, 209062, |
| LP04, LP05, LP06, | | 209063, 209064, 209065, 209066, |
| LP07, LP08, LP09, | | 209067, 209068, 209069 |
| LP10, LP11, | | |
| LP12 | Jan-12-98 | 209579 |
| LP13 | Jan-12-98 | 209578 |
| LP14 | Jul-16-98 | 203067 |
| LP15 | Jul-16-98 | 203068 |
| LP16 | Feb-1-99 | 203609 |
| LP17 | Feb-1-99 | 203610 |
| LP20 | Nov-17-98 | 203485 |
| LP21 | Jun-18-99 | PTA-252 |
| LP22 | Jun-18-99 | PTA-253 |
| LP23 | Dec-22-99 | PTA-1081 |

### EXAMPLES

### Example 1

[0930] Isolation of a Selected cDNA Clone from the Deposited Sample

[0931] Each Clone ID NO:Z is contained in a plasmid. Table 7 identifies the vectors used to construct the cDNA library from which each clone was isolated. In many cases, the vector used to construct the library is a phage vector from which a plasmid has been excised. The following correlates the related plasmid for each phage vector used in constructing the cDNA library. For example, where a particular clone is identified in Table 7 as being isolated in the vector “Lambda Zap,” the corresponding deposited clone is in “pBluescript.”

| Vector Used to Construct Library | Corresponding Deposited Plasmid |
|---|---|
| Lambda Zap | pBluescript (pBS) |
| Uni-Zap XR | pBluescript (pBS) |
| Zap Express | pBK |
| lafmid BA | plafmid BA |
| pSport1 | pSport1 |
| pCMVSport 2.0 | pCMVSport 2.0 |
| pCMVSport 3.0 | pCMVSport 3.0 |
| pCR ® 2.1 | pCR ® 2.1 |

[0932] Vectors Lambda Zap (U.S. Pat. Nos. 5,128,256 and 5,286,636), Uni-Zap XR (U.S. Pat. Nos. 5,128,256 and 5,286,636), Zap Express (U.S. Pat. Nos. 5,128,256 and 5,286,636), pBluescript (pBS) (Short, J. M. et al., Nucleic Acids Res. 16:7583-7600 (1988); Alting-Mees, M. A. and Short, J. M., Nucleic Acids Res. 17:9494 (1989)) and pBK (Alting-Mees, M. A. et al., Strategies 5:58-61 (1992)) are commercially available from Stratagene Cloning Systems, Inc., 11011 N. Torrey Pines Road, La Jolla, Calif., 92037. pBS contains an ampicillin resistance gene and pBK contains a neomycin resistance gene. Both can be transformed into E. coli strain XL-1 Blue, also available from Stratagene. pBS comes in 4 forms SK+, SK−, KS+ and KS. The S and K refers to the orientation of the polylinker to the T7 and T3 primer sequences which flank the polylinker region (“S” is for SacI and “K” is for KpnI which are the first sites on each respective end of the linker). “+” or “−” refer to the orientation of the f1 origin of replication (“ori”), such that in one orientation, single stranded rescue initiated from the f1 ori generates sense strand DNA and in the other, antisense.

[0933] Vectors pSport1, pCMVSport 2.0 and pCMVSport 3.0, were obtained from Life Technologies, Inc., P. O. Box 6009, Gaithersburg, Md. 20897. All Sport vectors contain an ampicillin resistance gene and may be transformed into E. coli strain DH10B, also available from Life Technologies. (See, for instance, Gruber, C. E., et al., Focus 15:59 (1993).) Vector lafmid BA (Bento Soares, Columbia University, NY) contains an ampicillin resistance gene and can be transformed into E. coli strain XL-1 Blue. Vector pCR®2.1, which is available from Invitrogen, 1600 Faraday Avenue, Carlsbad, Calif. 92008, contains an ampicillin resistance gene and may be transformed into E. coli strain DH10B, available from Life Technologies. (See, for instance, Clark, J. M., Nuc. Acids Res. 16:9677-9686 (1988) and Mead, D. et al., Bio/Technology 9: (1991).) Preferably, a polynucleotide of the present invention does not comprise the vector sequences identified for the particular clone in Table 7, as well as the corresponding plasmid vector sequences designated above.

[0934] The deposited material in the sample assigned the ATCC Deposit Number cited by reference to Tables 1A, 2, 6 and 7 for any given cDNA clone also may contain one or more additional plasmids, each comprising a cDNA clone different from that given clone. Thus, deposits sharing the same ATCC Deposit Number contain at least a plasmid for each Clone ID NO:Z.

TABLE 7

| | | | ATCC |
|---|---|---|---|
| Libraries owned by Catalog | Catalog Description | Vector | Deposit |
| HUKA HUKB HUKC HUKD HUKE | Human Uterine Cancer | Lambda ZAP II | LP01 |
| HUKF HUKG | | | |
| HCNA HCNB | Human Colon | Lambda Zap II | LP01 |
| HFFA | Human Fetal Brain, random primed | Lambda Zap II | LP01 |
| HTWA | Resting T-Cell | Lambda ZAP II | LP01 |
| HBQA | Early Stage Human Brain, random | Lambda ZAP II | LP01 |
| | primed | | |
| HLMB HLMF HLMG HLMH HLMI | breast lymph node CDNA library | Lambda ZAP II | LP01 |
| HLMJ HLMM HLMN | | | |
| HCQA HCQB | human colon cancer | Lamda ZAP II | LP01 |
| HMEA HMEC HMED HMEE | Human Microvascular Endothelial | Lambda ZAP II | LP01 |
| HMEF HMEG HMEI HMEJ HMEK | Cells, fract. A | | |
| HMEL | | | |
| HUSA HUSC | Human Umbilical Vein Endothelial | Lambda ZAP II | LP01 |
| | Cells, fract. A | | |
| HLQA HLQB | Hepatocellular Tumor | Lambda ZAP II | LP01 |
| HHGA HHGB HHGC HHGD | Hemangiopericytoma | Lambda ZAP II | LP01 |
| HSDM | Human Striatum Depression, re-rescue | Lambda ZAP II | LP01 |
| HUSH | H Umbilical Vein Endothelial Cells, | Lambda ZAP II | LP01 |
| | frac A, re-excision | | |
| HSGS | Salivary gland, subtracted | Lambda ZAP II | LP01 |
| HFXA HFXB HFXC HFXD HFXE | Brain frontal cortex | Lambda ZAP II | LP01 |
| HFXF HFXG HFXH | | | |
| HPQA HPQB HPQC | PERM TF274 | Lambda ZAP II | LP01 |
| HFXJ HFXK | Brain Frontal Cortex, re-excision | Lambda ZAP II | LP01 |
| HCWA HCWB HCWC HCWD | CD34 positive cells (Cord Blood) | ZAP Express | LP02 |
| HCWE HCWF HCWG HCWH | | | |
| HCWI HCWJ HCWK | | | |
| HCUA HCUB HCUC | CD34 depleted Buffy, Coat (Cord | ZAP Express | LP02 |
| | Blood) | | |
| HRSM | A-14 cell line | ZAP Express | LP02 |
| HRSA | A1-CELL LINE | ZAP Express | LP02 |
| HCUD HCUE HCUF HCUG HCUH | CD34 depleted Buffy Coat (Cord | ZAP Express | LP02 |
| HCUI | Blood), re-excision | | |
| HBXE HBXF HBXG | H. Whole Brain #2, re-excision | ZAP Express | LP02 |
| HRLM | L8 cell line | ZAP Express | LP02 |
| HBXA HBXB HBXC HBXD | Human Whole Brain #2 - Oligo dT > | ZAP Express | LP02 |
| | 1.5 Kb | | |
| HUDA HUDB HUDC | Testes | ZAP Express | LP02 |
| HHTM HHTN HHTO | H. hypothalamus, frac A; re-excision | ZAP Express | LP02 |
| HHTL | H. hypothalamus, frac A | ZAP Express | LP02 |
| HASA HASD | Human Adult Spleen | Uni-ZAP XR | LP03 |
| HFKC HFKD HFKE HFKF HFKG | Human Fetal Kidney | Uni-ZAP XR | LP03 |
| HE8A HE8B HE8C HE8D HE8E | Human 8 Week Whole Embryo | Uni-ZAP XR | LP03 |
| HE8F HE8M HE8N | | | |
| HGBA HGBD HGBE HGBF HGBG | Human Gall Bladder | Uni-ZAP XR | LP03 |
| HGBH HGBI | | | |
| HLHA HLHB HLHC HLHD HLHE | Human Fetal Lung III | Uni-ZAP XR | LP03 |
| HLHF HLHG HLHH HLHQ | | | |
| HPMA HPMB HPMC HPMD HPME | Human Placenta | Uni-ZAP XR | LP03 |
| HPMF HPMG HPMH | | | |
| HPRA HPRB HPRC HPRD | Human Prostate | Uni-ZAP XR | LP03 |
| HSIA HSIC HSID HSIE | Human Adult Small Intestine | Uni-ZAP XR | LP03 |
| HTEA HTEB HTEC HTED HTEE | Human Testes | Uni-ZAP XR | LP03 |
| HTEF HTEG HTEH HTEI HTEJ | | | |
| HTEK | | | |
| HTPA HTPB HTPC HTPD HTPE | Human Pancreas Tumor | Uni-ZAP XR | LP03 |
| HTTA HTTB HTTC HTTD HTTE | Human Testes Tumor | Uni-ZAP XR | LP03 |
| HTTF | | | |
| HAPA HAPB HAPC HAPM | Human Adult Pulmonary | Uni-ZAP XR | LP03 |
| HETA HETB HETC HETD HETE | Human Endometrial Tumor | Uni-ZAP XR | LP03 |
| HETF HETG HETH HETI | | | |
| HHFB HHFC HHFD HHFE HHFF | Human Fetal Heart | Uni-ZAP XR | LP03 |
| HHFG HHFH HHFI | | | |
| HHPB HHPC HHPD HHPE HHPF | Human Hippocampus | Uni-ZAP XR | LP03 |
| HHPG HHPH | | | |
| HCE1 HCE2 HCE3 HCE4 HCE5 | Human Cerebellum | Uni-ZAP XR | LP03 |
| HCEC HCEC HCED HCEE HCEF | | | |
| HCEG | | | |
| HUVB HUVC HUVD HUVE | Human Umbilical Vein, Endo. remake | Uni-ZAP XR | LP03 |
| HSTA HSTB HSTC HSTD | Human Skin Tumor | Uni-ZAP XR | LP03 |
| HTAA HTAB HTAC HTAD HTAE | Human Activated T-Cells | Uni-ZAP XR | LP03 |
| HFEA HFEB HFEC | Human Fetal Epithelium (Skin) | Uni-ZAP XR | LP03 |
| HJPA HJPB HJPC HJPD | HUMAN JURKAT MEMBRANE | Uni-ZAP XR | LP03 |
| | BOUND POLYSOMES | | |
| HESA | Human epithelioid sarcoma | Uni-Zap XR | LP03 |
| HLTA HLTB HLTC HLTD HLTE | Human T-Cell Lymphoma | Uni-ZAP XR | LP03 |
| HLTF | | | |
| HFTA HFTB HFTC HFTD | Human Fetal Dura Mater | Uni-ZAP XR | LP03 |
| HRDA HRDB HRDC HRDD HRDE | Human Rhabdomyosarcoma | Uni-ZAP XR | LP03 |
| HRDF | | | |
| HCAA HCAB HCAC | Cem cells cyclohexamide treated | Uni-ZAP XR | LP03 |
| HRGA HRGB HRGC HRGD | Raji Cells, cyclohexamide treated | Uni-ZAP XR | LP03 |
| HSUA HSUB HSUC HSUM | Supt Cells, cyclohexamide treated | Uni-ZAP XR | LP03 |
| HT4A HT4C HT4D | Activated T-Cells, 12 hrs. | Uni-ZAP XR | LP03 |
| HE9A HE9B HE9C HE9D HE9E | Nine Week Old Early Stage Human | Uni-ZAP XR | LP03 |
| HE9F HE9G HE9H HE9M HE9N | | | |
| HATA HATB HATC HATD HATE | Human Adrenal Gland Tumor | Uni-ZAP XR | LP03 |
| HT5A | Activated T-Cells, 24 hrs. | Uni-ZAP XR | LP03 |
| HFGA HFGM | Human Fetal Brain | Uni-ZAP XR | LP03 |
| HNEA HNEB HNEC HNED HNEE | Human Neutrophil | Uni-ZAP XR | LP03 |
| HBGB HBGD | Human Primary Breast Cancer | Uni-ZAP XR | LP03 |
| HBNA HBNB | Human Normal Breast | Uni-ZAP XR | LP03 |
| HCAS | Cem Cells, cyclohexamide treated, | Uni-ZAP XR | LP03 |
| | subtra | | |
| HHPS | Human Hippocampus, subtracted | pBS | LP03 |
| HKCS HKCU | Human Colon Cancer, subtracted | pBS | LP03 |
| HRGS | Raji cells, cyclohexamide treated, | pBS | LP03 |
| | subtracted | | |
| HSUT | Supt cells, cyclohexamide treated, | pBS | LP03 |
| | differentially expressed | | |
| HT4S | Activated T-Cells, 12 hrs, subtracted | Uni-ZAP XR | LP03 |
| HCDA HCDB HCDC HCDD HCDE | Human Chondrosarcoma | Uni-ZAP XR | LP03 |
| HOAA HOAB HOAC | Human Osteosarcoma | Uni-ZAP XR | LP03 |
| HTLA HTLB HTLC HTLD HTLE | Human adult testis, large inserts | Uni-ZAP XR | LP03 |
| HTLF | | | |
| HLMA HLMC HLMD | Breast Lymph node cDNA library | Uni-ZAP XR | LP03 |
| H6EA H6EB H6EC | HL-60, PMA 4H | Uni-ZAP XR | LP03 |
| HTXA HTXB HTXC HTXD HTXE | Activated T-Cell (12 hs)/Thiouridine | Uni-ZAP XR | LP03 |
| HTXF HTXG HTXH | labelled Eco | | |
| HNFA HNFB HNFC HNFD HNFE | Human Neutrophil, Activated | Uni-ZAP XR | LP03 |
| HNFF HNFG HNFH HNFJ | | | |
| HTOB HTOC | HUMAN TONSILS, FRACTION 2 | Uni-ZAP XR | LP03 |
| HMGB | Human OB MG63 control fraction I | Uni-ZAP XR | LP03 |
| HOPB | Human OB HOS control fraction I | Uni-ZAP XR | LP03 |
| HORB | Human OB HOS treated (10 nM E2) | Uni-ZAP XR | LP03 |
| | fraction I | | |
| HSVA HSVB HSVC | Human Chronic Synovitis | Uni-ZAP XR | LP03 |
| HROA | HUMAN STOMACH | Uni-ZAP XR | LP03 |
| HBJA HBJB HBJC HBJD HBJE | HUMAN B CELL LYMPHOMA | Uni-ZAP XR | LP03 |
| HBJF HBJG HBJH HBJI HBJJ | | | |
| HBJK | | | |
| HCRA HCRB HCRC | human corpus colosum | Uni-ZAP XR | LP03 |
| HODA HODB HODC HODD | human ovarian cancer | Uni-ZAP XR | LP03 |
| HDSA | Dermatofibrosarcoma Protuberance | Uni-ZAP XR | LP03 |
| HMWA HMWB HMWC HMWD | Bone Marrow Cell Line (RS4;11) | Uni-ZAP XR | LP03 |
| HMWE HMWF HMWG HMWH | | | |
| HMWI HMWJ | | | |
| HSOA | stomach cancer (human) | Uni-ZAP XR | LP03 |
| HERA | SKIN | Uni-ZAP XR | LP03 |
| HMDA | Brain-medulloblastoma | Uni-ZAP XR | LP03 |
| HGLA HGLB HGLD | Glioblastoma | Uni-ZAP XR | LP03 |
| HEAA | H. Atrophic Endometrium | Uni-ZAP XR | LP03 |
| HBCA HBCB | H. Lymph node breast Cancer | Uni-ZAP XR | LP03 |
| HPWT | Human Prostate BPH, re-excision | Uni-ZAP XR | LP03 |
| HFVG HFVH HFVI | Fetal Liver, subtraction II | pBS | LP03 |
| HNFI | Human Neutrophils, Activated, re- | pBS | LP03 |
| | excision | | |
| HBMB HBMC HBMD | Human Bone Marrow, re-excision | pBS | LP03 |
| HKML HKMM HKMN | H. Kidney Medulla, re-excision | pBS | LP03 |
| HKIX HKIY | H. Kidney Cortex, subtracted | pBS | LP03 |
| HADT | H. Amygdala Depression, subtracted | pBS | LP03 |
| H6AS | HI-60, untreated, subtracted | Uni-ZAP XR | LP03 |
| H6ES | HL-60, PMA 4H, subtracted | Uni-ZAP XR | LP03 |
| H6BS | HL-60, RA 4h, Subtracted | Uni-ZAP XR | LP03 |
| H6CS | HL-60, PMA 1d, subtracted | Uni-ZAP XR | LP03 |
| HTXJ HTXK | Activated T-cell (12 h)/Thiouridine-re- | Uni-ZAP XR | LP03 |
| | excision | | |
| HMSA HMSB HMSC HMSD HMSE | Monocyte activated | Uni-ZAP XR | LP03 |
| HMSF HMSG HMSH HMSI HMSJ | | | |
| HMSK | | | |
| HAGA HAGB HAGC HAGD HAGE | Human Amygdala | Uni-ZAP XR | LP03 |
| HAGF | | | |
| HSRA HSRB HSRE | STROMAL -OSTEOCLASTOMA | Uni-ZAP XR | LP03 |
| HSRD HSRF HSRG HSRH | Human Osteoclastoma Stromal Cells - | Uni-ZAP XR | LP03 |
| | unamplified | | |
| HSQA HSQB HSQC HSQD HSQE | Stromal cell TF274 | Uni-ZAP XR | LP03 |
| HSQF HSQG | | | |
| HSKA HSKB HSKC HSKD HSKE | Smooth muscle, serum treated | Uni-ZAP XR | LP03 |
| HSKF HSKZ | | | |
| HSLA HSLB HSLC HSLD HSLE | Smooth muscle, control | Uni-ZAP XR | LP03 |
| HSLF HSLG | | | |
| HSDA HSDD HSDE HSDF HSDG | Spinal cord | Uni-ZAP XR | LP03 |
| HSDH | | | |
| HPWS | Prostate-BPH subtracted II | pBS | LP03 |
| HSKW HSKX HSKY | Smooth Muscle- HASTE normalized | pBS | LP03 |
| HFPB HFPC HFPD | H. Frontal cortex, epileptic; re-excision | Uni-ZAP XR | LP03 |
| HSDI HSDJ HSDK | Spinal Cord, re-excision | Uni-ZAP XR | LP03 |
| HSKN HSKO | Smooth Muscle Serum Treated, Norm | pBS | LP03 |
| HSKG HSKH HSKI | Smooth muscle, serum induced, re-exc | pBS | LP03 |
| HFCA HFCB HFCC HFCD HFCE | Human Fetal Brain | Uni-ZAP XR | LP04 |
| HFCF | | | |
| HPTA HPTB HPTD | Human Pituitary | Uni-ZAP XR | LP04 |
| HTHB HTHC HTHD | Human Thymus | Uni-ZAP XR | LP04 |
| HE6B HE6C HE6D HE6E HE6F | Human Whole Six Week Old Embryo | Uni-ZAP XR | LP04 |
| HE6G HE6S | | | |
| HSSA HSSB HSSC HSSD HSSE | Human Synovial Sarcoma | Uni-ZAP XR | LP04 |
| HSSF HSSG HSSH HSSI HSSJ | | | |
| HSSK | | | |
| HE7T | 7 Week Old Early Stage Human, | Uni-ZAP XR | LP04 |
| | subtracted | | |
| HEPA HEPB HEPC | Human Epididymus | Uni-ZAP XR | LP04 |
| HSNA HSNB HSNC HSNM HSNN | Human Synovium | Uni-ZAP XR | LP04 |
| HPFB HPFC HPFD HPFE | Human Prostate Cancer, Stage C | Uni-ZAP XR | LP04 |
| | fraction | | |
| HE2A HE2D HE2E HE2H HE2I | 12 Week Old Early Stage Human | Uni-ZAP XR | LP04 |
| HE2M HE2N HE2O | | | |
| HE2B HE2C HE2F HE2G HE2P | 12 Week Old Early Stage Human, II | Uni-ZAP XR | LP04 |
| HE2Q | | | |
| HPTS HPTT HPTU | Human Pituitary, subtracted | Uni-ZAP XR | LP04 |
| HAUA HAUB HAUC | Amniotic Cells - TNF induced | Uni-ZAP XR | LP04 |
| HAQA HAQB HAQC HAQD | Amniotic Cells - Primary Culture | Uni-ZAP XR | LP04 |
| HWTA HWTB HWTC | wilm's tumor | Uni-ZAP XR | LP04 |
| HBSD | Bone Cancer, re-excision | Uni-ZAP XR | LP04 |
| HSGB | Salivary gland, re-excision | Uni-ZAP XR | LP04 |
| HSJA HSJB HSJC | Smooth muscle-ILb induced | Uni-ZAP XR | LP04 |
| HSXA HSXB HSXC HSXD | Human Substantia Nigra | Uni-ZAP XR | LP04 |
| HSHA HSHB HSHC | Smooth muscle, IL1b induced | Uni-ZAP XR | LP04 |
| HOUA HOUB HOUC HOUD HOUE | Adipocytes | Uni-ZAP XR | LP04 |
| HPWA HPWB HPWC HPWD | Prostate BPH | Uni-ZAP XR | LP04 |
| HPWE | | | |
| HELA HELB HELC HELD HELE | Endothelial cells-control | Uni-ZAP XR | LP04 |
| HELF HELG HELH | | | |
| HEMA HEMB HEMC HEMD | Endothelial-induced | Uni-ZAP XR | LP04 |
| HEME HEMF HEMG HEMH | | | |
| HBIA HBIB HBIC | Human Brain, Striatum | Uni-ZAP XR | LP04 |
| HHSA HHSB HHSC HHSD HHSE | Human Hypothalmus, Schizophrenia | Uni-ZAP XR | LP04 |
| HNGA HNGB HNGC HNGD HNGE | neutrophils control | Uni-ZAP XR | LP04 |
| HNGF HNGG HNGH HNGI HNGJ | | | |
| HNHA HNHB HNHC HNHD HNHE | Neutrophils IL-1 and LPS induced | Uni-ZAP XR | LP04 |
| HNHF HNHG HNHH HNHI HNHJ | | | |
| HSDB HSDC | STRIATUM DEPRESSION | Uni-ZAP XR | LP04 |
| HHPT | Hypothalamus | Uni-ZAP XR | LP04 |
| HSAT HSAU HSAV HSAW HSAX | Anergic T-cell | Uni-ZAP XR | LP04 |
| HSAY HSAZ | | | |
| HBMS HBMT HBMU HBMV | Bone marrow | Uni-ZAP XR | LP04 |
| HBMW HBMX | | | |
| HOEA HOEB HOEC HOED HOEE | Osteoblasts | Uni-ZAP XR | LP04 |
| HOEF HOEJ | | | |
| HAIA HAIB HAIC HAID HAIE | Epithelial-TNFa and INF induced | Uni-ZAP XR | LP04 |
| HAIF | | | |
| HTGA HTGB HTGC HTGD | Apoptotic T-cell | Uni-ZAP XR | LP04 |
| HMCA HMCB HMCC HMCD | Macrophage-oxLDL | Uni-ZAP XR | LP04 |
| HMCE | | | |
| HMAA HMAB HMAC HMAD | Macrophage (GM-CSF treated) | Uni-ZAP XR | LP04 |
| HMAE HMAF HMAG | | | |
| HPHA | Normal Prostate | Uni-ZAP XR | LP04 |
| HPIA HPIB HPIC | LNCAP prostate cell line | Uni-ZAP XR | LP04 |
| HPJA HPJB HPJC | PC3 Prostate cell line | Uni-ZAP XR | LP04 |
| HOSE HOSF HOSG | Human Osteoclastoma, re-excision | Uni-ZAP XR | LP04 |
| HTGE HTGF | Apoptotic T-cell, re-excision | Uni-ZAP XR | LP04 |
| HMAJ HMAK | H Macrophage (GM-CSF treated), re- | Uni-ZAP XR | LP04 |
| | excision | | |
| HACB HACC HACD | Human Adipose Tissue, re-excision | Uni-ZAP XR | LP04 |
| HFPA | H. Frontal Cortex, Epileptic | Uni-ZAP XR | LP04 |
| HFAA HFAB HFAC HFAD HFAE | Alzheimer's, spongy change | Uni-ZAP XR | LP04 |
| HFAM | Frontal Lobe, Dementia | Uni-ZAP XR | LP04 |
| HMIA HMIB HMIC | Human Manic Depression Tissue | Uni-ZAP XR | LP04 |
| HTSA HTSE HTSF HTSG HTSH | Human Thymus | pBS | LP05 |
| HPBA HPBB HPBC HPBD HPBE | Human Pineal Gland | pBS | LP05 |
| HSAA HSAB HSAC | HSA 172 Cells | pBS | LP05 |
| HSBA HSBB HSBC HSBM | HSC172 cells | pBS | LP05 |
| HJAA HJAB HJAC HJAD | Jurkat T-cell G1 phase | pBS | LP05 |
| HJBA HJBB HJBC HJBD | Jurkat T-Cell, S phase | pBS | LP05 |
| HAFA HAFB | Aorta endothelial cells + TNF-a | pBS | LP05 |
| HAWA HAWB HAWC | Human White Adipose | pBS | LP05 |
| HTNA HTNB | Human Thyroid | pBS | LP05 |
| HONA | Normal Ovary, Premenopausal | pBS | LP05 |
| HARA HARB | Human Adult Retina | pBS | LP05 |
| HLJA HLJB | Human Lung | pCMVSport 1 | LP06 |
| HOFM HOFN HOFO | H. Ovarian Tumor, II, OV5232 | pCMVSport 2.0 | LP07 |
| HOGA HOGB HOGC | OV 10-3-95 | pCMVSport 2.0 | LP07 |
| HCGL | CD34 + cells, II | pCMVSport 2.0 | LP07 |
| HDLA | Hodgkin's Lymphoma I | pCMVSport 2.0 | LP07 |
| HDTA HDTB HDTC HDTD HDTE | Hodgkin's Lymphoma II | pCMV Sport 2.0 | LP07 |
| HKAA HKAB HKAC HKAD HKAE | Keratinocyte | pCMVSport2.0 | LP07 |
| HKAF HKAG HKAH | | | |
| HCIM | CAPFINDER, Crohn's Disease, lib 2 | pCMV Sport 2.0 | LP07 |
| HKAL | Keratinocyte, lib 2 | pCMVSport2.0 | LP07 |
| HKAT | Keratinocyte, lib 3 | pCMVSport2.0 | LP07 |
| HNDA | Nasal polyps | pCMVSport2.0 | LP07 |
| HDRA | H. Primary Dendritic Cells, lib 3 | pCMVSport2.0 | LP07 |
| HOHA HOHB HOHC | Human Osteoblasts II | pCMVSport2.0 | LP07 |
| HLDA HLDB HLDC | Liver, Hepatoma | pCMVSport3.0 | LP08 |
| HLDN HLDO HLDP | Human Liver, normal | pCMVSport3.0 | LP08 |
| HMTA | pBMC stimulated w/poly I/C | pCMVSport3.0 | LP08 |
| HNTA | NTERA2, control | pCMVSport3.0 | LP08 |
| HDPA HDPB HDPC HDPD HDPF | Primary Dendritic Cells, lib 1 | pCMVSport3.0 | LP08 |
| HDPG HDPH HDPI HDPJ HDPK | | | |
| HDPM HDPN HDPO HDPP | Primary Dendritic cells, frac 2 | pCMVSport3.0 | LP08 |
| HMUA HMUB HMUC | Myoloid Progenitor Cell Line | pCMVSport3.0 | LP08 |
| HHEA HHEB HHEC HHED | T Cell helper I | pCMVSport3.0 | LP08 |
| HHEM HHEN HHEO HHEP | T cell helper II | pCMVSport3.0 | LP08 |
| HEQA HEQB HEQC | Human endomeirial stromal cells | pCMVSport3.0 | LP08 |
| HJMA HJMB | Human endometrial stromal cells- | pCMVSport3.0 | LP08 |
| | treated with progesterone | | |
| HSWA HSWB HSWC | Human endometrial stromal cells- | pCMVSport3.0 | LP08 |
| | treated with estradiol | | |
| HSYA HSYB HSYC | Human Thymus Stromal Cells | pCMVSport3.0 | LP08 |
| HLWA HLWB HLWC | Human Placenta | pCMVSport3.0 | LP08 |
| HRAA HRAB HRAC | Rejected Kidney, lib 4 | pCMVSport3.0 | LP08 |
| HMTM | PCR, pBMC I/C treated | PCRII | LP09 |
| HMJA | H. Meniingima, M6 | pSport 1 | LP10 |
| HMKA HMKB HMKC HMKD | H. Meningima, M1 | pSport 1 | LP10 |
| HMKE | | | |
| HUSG HUSI | Human umbilical vein endothelial cells, | pSport 1 | LP10 |
| | IL-4 induced | | |
| HUSX HUSY | Human Umbilical Vein Endothelial | pSport 1 | LP10 |
| | Cells, uninduced | | |
| HOFA | Ovarian Tumor I, OV5232 | pSport 1 | LP10 |
| HCFA HCFB HCFC HCFD | T-Cell PHA 16 hrs | pSport 1 | LP10 |
| HCFL HCFM HCFN HCFO | T-Cell PHA 24 hrs | pSport 1 | LP10 |
| HADA HADC HADD HADE HADF | Human Adipose | pSport 1 | LP10 |
| HADG | | | |
| HOVA HOVB HOVC | Human Ovary | pSport 1 | LP10 |
| HTWB HTWC HTWD HTWE | Resting T-Cell Library, II | pSport 1 | LP10 |
| HTWF | | | |
| HMMA | Spleen metastic melanoma | pSport 1 | LP10 |
| HLYA HLYB HLYC HLYD HLYE | Spleen, Chronic lymphocytic leukemia | pSport 1 | LP10 |
| HCGA | CD34 + cell, I | pSport 1 | LP10 |
| HEOM HEON | Human Eosinophils | pSport 1 | LP10 |
| HTDA | Human Tonsil, Lib 3 | pSport 1 | LP10 |
| HSPA | Salivary Gland, Lib 2 | pSport 1 | LP10 |
| HCHA HCHB HCHC | Breast Cancer cell line, MDA 36 | pSport 1 | LP10 |
| HCHM HCHN | Breast Cancer Cell line, angiogenic | pSport 1 | LP10 |
| HCIA | Crohn's Disease | pSport 1 | LP10 |
| HDAA HDAB HDAC | HEL cell line | pSport 1 | LP10 |
| HABA | Human Astrocyte | pSport 1 | LP10 |
| HUFA HUFB HUFC | Ulcerative Colitis | pSport 1 | LP10 |
| HNTM | NTERA2 + retinoic acid, 14 days | pSport 1 | LP10 |
| HDQA | Primary Dendritic cells, CapFinder2, | pSport 1 | LP10 |
| | frac 1 | | |
| HDQM | Primary Dendritic Cells, CapFinder, | pSport 1 | LP10 |
| | frac 2 | | |
| HLDX | Human Liver, normal, CapFinder | pSport 1 | LP10 |
| HULA HULB HULC | Human Dermal Endothelial | pSport1 | LP10 |
| | Cells, untreated | | |
| HUMA | Human Dermal Endothelial cells, treated | pSport1 | LP10 |
| HCJA | Human Stromal Endometrial | pSport1 | LP10 |
| | fibroblasts, untreated | | |
| HCJM | Human Stromal endometrial fibroblasts, | pSport1 | LP10 |
| | treated w/ estradiol | | |
| HEDA | Human Stromal endometrial fibroblasts, | pSport1 | LP10 |
| | treated with progesterone | | |
| HFNA | Human ovary tumor cell OV350721 | pSport1 | LP10 |
| HKGA HKGB HKGC HKGD | Merkel Cells | pSport1 | LP10 |
| HISA HISB HISC | Pancreas Islet Cell Tumor | pSport1 | LP10 |
| HLSA | Skin, burned | pSport1 | LP10 |
| HBZA | Prostate, BPH, Lib 2 | pSport 1 | LP10 |
| HBZS | Prostate BPH, Lib 2, subtracted | pSport 1 | LP10 |
| HFIA HFIB HFIC | Synovial Fibroblasts (control) | pSport 1 | LP10 |
| HFIH HFII HFIJ | Synovial hypoxia | pSport 1 | LP10 |
| HFIT HFIU HFIV | Synovial IL-1/TNF stimulated | pSport 1 | LP10 |
| HGCA | Messangial cell, frac 1 | pSport1 | LP10 |
| HMVA HMVB HMVC | Bone Marrow Stromal Cell, untreated | pSport1 | LP10 |
| HFIX HFIY HFIZ | Synovial Fibroblasts (III/TNF), subt | pSport1 | LP10 |
| HFOX HFOY HFOZ | Synovial hypoxia-RSF subtracted | pSport1 | LP10 |
| HMQA HMQB HMQC HMQD | Human Activated Monocytes | Uni-ZAP XR | LP11 |
| HLIA HLIB HLIC | Human Liver | pCMVSport 1 | LP012 |
| HHBA HHBB HHBC HHBD HHBE | Human Heart | pCMVSport 1 | LP012 |
| HBBA HBBB | Human Brain | pCMVSport 1 | LP012 |
| HLJA HLJB HLJC HLJD HLJE | Human Lung | pCMVSport 1 | LP012 |
| HOGA HOGB HOGC | Ovarian Tumor | pCMVSport 2.0 | LP012 |
| HTJM | Human Tonsils, Lib 2 | pCMVSport 2.0 | LP012 |
| HAMF HAMG | KMH2 | pCMVSport 3.0 | LP012 |
| HAJA HAJB HAJC | L428 | pCMVSport 3.0 | LP012 |
| HWBA HWBB HWBC HWBD | Dendritic cells, pooled | pCMVSport 3.0 | LP012 |
| HWBE | | | |
| HWAA HWAB HWAC HWAD | Human Bone Marrow, treated | pCMVSport 3.0 | LP012 |
| HWAE | | | |
| HYAA HYAB HYAC | B Cell lymphoma | pCMVSport 3.0 | LP012 |
| HWHG HWHH HWHI | Healing groin wound, 6.5 hours post | pCMVSport 3.0 | LP012 |
| | incision | | |
| HWHP HWHQ HWHR | Healing groin wound; 7.5 hours post | pCMVSport 3.0 | LP012 |
| | incision | | |
| HARM | Healing groin wound - zero hr post- | pCMV Sport 3.0 | LP012 |
| | incision (control) | | |
| HBIM | Olfactory epithelium; nasalcavity | pCMVSport 3.0 | LP012 |
| HWDA | Healing Abdomen wound; 70 & 90 min | pCMVSport 3.0 | LP012 |
| | post incision | | |
| HWEA | Healing Abdomen Wound; 15 days post | pCMVSport 3.0 | LP012 |
| | incision | | |
| HWJA | Healing Abdomen Wound; 21 & 29 days | pCMVSport 3.0 | LP012 |
| HNAL | Human Tongue, frac 2 | pSport1 | LP012 |
| HMJA | H. Meniingima, M6 | pSport1 | LP012 |
| HMKA HMKB HMKC HMKD | H. Meningima, M1 | pSport1 | LP012 |
| HMKE | | | |
| HOFA | Ovarian Tumor I, OV5232 | pSport1 | LP012 |
| HCFA HCFB HCFC HCFD | T-Cell PHA 16 hrs | pSport1 | LP012 |
| HCFL HCFM HCFN HCFO | T-Cell PHA 24 hrs | pSport1 | LP012 |
| HMMA HMMB HMMC | Spleen metastic melanoma | pSport1 | LP012 |
| HTDA | Human Tonsil, Lib 3 | pSport1 | LP012 |
| HDBA | Human Fetal Thymus | pSport1 | LP012 |
| HDUA | Pericardium | pSport1 | LP012 |
| HBZA | Prostate, BPH, Lib 2 | pSport1 | LP012 |
| HWCA | Larynx tumor | pSport1 | LP012 |
| HWKA | Normal lung | pSport1 | LP012 |
| HSMB | Bone marrow stroma, treated | pSport1 | LP012 |
| HBHM | Normal trachea | pSport1 | LP012 |
| HLFC | Human Larynx | pSport1 | LP012 |
| HLRB | Siebben Polyposis | pSport1 | LP012 |
| HNIA | Mammary Gland | pSport1 | LP012 |
| HNJB | Palate carcinoma | pSport1 | LP012 |
| HNKA | Palate normal | pSport1 | LP012 |
| HMZA | Pharynx carcinoma | pSport1 | LP012 |
| HABG | Cheek Carcinoma | pSport1 | LP012 |
| HMZM | Pharynx Carcinoma | pSport1 | LP012 |
| HDRM | Larynx Carcinoma | pSport1 | LP012 |
| HVAA | Pancreas normal PCA4 No | pSport1 | LP012 |
| HICA | Tongue carcinoma | pSport1 | LP012 |
| HUKA HUKB HUKC HUKD HUKE | Human Uterine Cancer | Lambda ZAP II | LP013 |
| HFFA | Human Fetal Brain, random primed | Lambda ZAP II | LP013 |
| HTUA | Activated T-cell labeled with 4-thioluri | Lambda ZAP II | LP013 |
| HBQA | Early Stage Human Brain, random | Lambda ZAP II | LP013 |
| | primed | | |
| HMEB | Human microvascular Endothelial cells, | Lambda ZAP II | LP013 |
| | fract. B | | |
| HUSH | Human Umbilical Vein Endothelial | Lambda ZAP II | LP013 |
| | cells, fract. A, re-excision | | |
| HLQC HLQD | Hepatocellular tumor, re-excision | Lambda ZAP II | LP013 |
| HTWJ HTWK HTWL | Resting T-cell, re-excision | Lambda ZAP II | LP013 |
| HF6S | Human Whole 6 week Old Embryo (II), | pBluescript | LP013 |
| | subt | | |
| HHPS | Human Hippocampus, subtracted | pBluescript | LP013 |
| HL1S | LNCAP, differential expression | pBluescript | LP013 |
| HLHS HLHT | Early Stage Human Lung, Subtracted | pBluescript | LP013 |
| HSUS | Supt cells, cyclohexamide treated, | pBluescript | LP013 |
| | subtracted | | |
| HSUT | Supt cells, cyclohexamide treated, | pBluescript | LP013 |
| | differentially expressed | | |
| HSDS | H. Striatum Depression, subtracted | pBluescript | LP013 |
| HPTZ | Human Pituitary, Subtracted VII | pBluescript | LP013 |
| HSDX | H. Striatum Depression, subt II | pBluescript | LP013 |
| HSDZ | H. Striatum Depression, subt | pBluescript | LP013 |
| HPBA HPBB HPBC HPBD HPBE | Human Pineal Gland | pBluescript SK- | LP013 |
| HRTA | Colorectal Tumor | pBluescript SK- | LP013 |
| HSBA HSBB HSBC HSBM | HSC172 cells | pBluescript SK- | LP013 |
| HJAA HJAB HJAC HJAD | Jurkat T-cell G1 phase | pBluescript SK- | LP013 |
| HJBA HJBB HJBC HJBD | Jurkat T-cell, S1 phase | pBluescnpt SK- | LP013 |
| HTNA HTNB | Human Thyroid | pBluescript SK- | LP013 |
| HAHA HAHB | Human Adult Heart | Uni-ZAP XR | LP013 |
| HE6A | Whole 6 week Old Embryo | Uni-ZAP XR | LP013 |
| HFCA HFCB HFCC HFCD HFCE | Human Fetal Brain | Uni-ZAP XR | LP013 |
| HFKC HFKD HFKE HFKF HFKG | Human Fetal Kidney | Uni-ZAP XR | LP013 |
| HGBA HGBD HGBE HGBF HGBG | Human Gall Bladder | Uni-ZAP XR | LP013 |
| HPRA HPRB HPRC HPRD | Human Prostate | Uni-ZAP XR | LP013 |
| HTEA HTEB HTEC HTED HTEE | Human Testes | Uni-ZAP XR | LP013 |
| HTTA HTTB HTTC HTTD HTTE | Human Testes Tumor | Uni-ZAP XR | LP013 |
| HYBA HYBB | Human Fetal Bone | Uni-ZAP XR | LP013 |
| HFLA | Human Fetal Liver | Uni-ZAP XR | LP013 |
| HHFB HHFC HHFD HHFE HHFF | Human Fetal Heart | Uni-ZAP XR | LP013 |
| HUVB HUVC HUVD HUVE | Human Umbilical Vein, End. remake | Uni-ZAP XR | LP013 |
| HTHB HTHC HTHD | Human Thymus | Uni-ZAP XR | LP013 |
| HSTA HSTB HSTC HSTD | Human Skin Tumor | Uni-ZAP XR | LP013 |
| HTAA HTAB HTAC HTAD HTAE | Human Activated T-cells | Uni-ZAP XR | LP013 |
| HFEA HFEB HFEC | Human Fetal Epithelium (skin) | Uni-ZAP XR | LP013 |
| HJPA HJPB HJPC HJPD | Human Jurkat Membrane Bound | Uni-ZAP XR | LP013 |
| | Polysomes | | |
| HESA | Human Epithelioid Sarcoma | Uni-ZAP XR | LP013 |
| HALS | Human Adult Liver, Subtracted | Uni-ZAP XR | LP013 |
| HFTA HFTB HFTC HFTD | Human Fetal Dura Mater | Uni-ZAP XR | LP013 |
| HCAA HCAB HCAC | Cern cells, cyclohexamide treated | Uni-ZAP XR | LP013 |
| HRGA HRGB HRGC HRGD | Raji Cells, cyclohexamide treated | Uni-ZAP XR | LP013 |
| HE9A HE9B HE9C HE9D HE9E | Nine Week Old Early Stage Human | Uni-ZAP XR | LP013 |
| HSFA | Human Fibrosarcoma | Uni-ZAP XR | LP013 |
| HATA HATB HATC HATD HATE | Human Adrenal Gland Tumor | Uni-ZAP XR | LP013 |
| HTRA | Human Trachea Tumor | Uni-ZAP XR | LP013 |
| HE2A HE2D HE2E HE2H HE2I | 12 Week Old Early Stage Human | Uni-ZAP XR | LP013 |
| HE2B HE2C HE2F HE2G HE2P | 12 Week Old Early Stage Human, II | Uni-ZAP XR | LP013 |
| HNEA HNEB HNEC HNED HNEE | Human Neutrophil | Uni-ZAP XR | LP013 |
| HBGA | Human Primary Breast Cancer | Uni-ZAP XR | LP013 |
| HPTS HPTT HPTU | Human Pituitary, subtracted | Uni-ZAP XR | LP013 |
| HMQA HMQB HMQC HMQD | Human Activated Monocytes | Uni-ZAP XR | LP013 |
| HOAA HOAB HOAC | Human Osteosarcoma | Uni-ZAP XR | LP013 |
| HTOA HTOD HTOE HTOF HTOG | human tonsils | Uni-ZAP XR | LP013 |
| HMGB | Human OB MG63 control fraction I | Uni-ZAP XR | LP013 |
| HOPB | Human OB HOS control fraction I | Uni-ZAP XR | LP013 |
| HOQB | Human OB HOS treated (1 nM E2) | Uni-ZAP XR | LP013 |
| | fraction I | | |
| HAUA HAUB HAUC | Amniotic Cells - TNF induced | Uni-ZAP XR | LP013 |
| HAQA HAQB HAQC HAQD | Amniotic Cells - Primary Culture | Uni-ZAP XR | LP013 |
| HROA HROC | HUMAN STOMACH | Uni-ZAP XR | LP013 |
| HBJA HBJB HBJC HBJD HBJE | HUMAN B CELL LYMPHOMA | Uni-ZAP XR | LP013 |
| HODA HODB HODC HODD | human ovarian cancer | Uni-ZAP XR | LP013 |
| HCPA | Corpus Callosum | Uni-ZAP XR | LP013 |
| HSOA | stomach cancer (human) | Uni-ZAP XR | LP013 |
| HERA | SKIN | Uni-ZAP XR | LP013 |
| HMDA | Brain-medulloblastoma | Uni-ZAP XR | LP013 |
| HGLA HGLB HGLD | Glioblastoma | Uni-ZAP XR | LP013 |
| HWTA HWTB HWTC | wilm's tumor | Uni-ZAP XR | LP013 |
| HEAA | H. Atrophic Endometrium | Uni-ZAP XR | LP013 |
| HAPN HAPO HAPP HAPQ HAPR | Human Adult Pulmonary; re-excision | Uni-ZAP XR | LP013 |
| HLTG HLTH | Human T-cell lymphoma; re-excision | Uni-ZAP XR | LP013 |
| HAHC HAHD HAHE | Human Adult Heart, re-excision | Uni-ZAP XR | LP013 |
| HAGA HAGB HAGC HAGD HAGE | Human Amygdala | Uni-ZAP XR | LP013 |
| HSJA HSJB HSJC | Smooth muscle-ILb induced | Uni-ZAP XR | LP013 |
| HSHA HSHB HSHC | Smooth muscle, IL1b induced | Uni-ZAP XR | LP013 |
| HPWA HPWB HPWC HPWD | Prostate BPH | Uni-ZAP XR | LP013 |
| HPWE | | | |
| HPIA HPIB HPIC | LNCAP prostate cell line | Uni-ZAP XR | LP013 |
| HPJA HPJB HPJC | PC3 Prostate cell line | Uni-ZAP XR | LP013 |
| HBTA | Bone Marrow Stroma, TNF & LPS ind | Uni-ZAP XR | LP013 |
| HMCF HMCG HMCH HMCI HMCJ | Macrophage-oxLDL; re-excision | Uni-ZAP XR | LP013 |
| HAGG HAGH HAGI | Human Amygdala; re-excision | Uni-ZAP XR | LP013 |
| HACA | H. Adipose Tissue | Uni-ZAP XR | LP013 |
| HKFB | K562 + PMA (36 hrs), re-excision | ZAP Express | LP013 |
| HCWT HCWU HCWV | CD34 positive cells (cord blood), re-ex | ZAP Express | LP013 |
| HBWA | Whole brain | ZAP Express | LP013 |
| HBXA HBXB HBXC HBXD | Human Whole Brain #2 - Oligo dT > | ZAP Express | LP013 |
| | 1.5 Kb | | |
| HAVM | Temporal cortex-Alzheizmer | pT-Adv | LP014 |
| HAVT | Hippocampus, Alzheimer Subtracted | pT-Adv | LP014 |
| HHAS | CHME Cell Line | Uni-ZAP XR | LP014 |
| HAJR | Larynx normal | pSport 1 | LP014 |
| HWLE HWLF HWLG HWLH | Colon Normal | pSport 1 | LP014 |
| HCRM HCRN HCRO | Colon Carcinoma | pSport 1 | LP014 |
| HWLI HWLJ HWLK | Colon Normal | pSport 1 | LP014 |
| HWLQ HWLR HWLS HWLT | Colon Tumor | pSport 1 | LP014 |
| HBFM | Gastrocnemius Muscle | pSport 1 | LP014 |
| HBOD HBOE | Quadriceps Muscle | pSport 1 | LP014 |
| HBKD HBKE | Soleus Muscle | pSport 1 | LP014 |
| HCCM | Pancreatic Langerhans | pSport 1 | LP014 |
| HWGA | Larynx carcinoma | pSport 1 | LP014 |
| HWGM HWGN | Larynx carcinoma | pSport 1 | LP014 |
| HWLA HWLB HWLC | Normal colon | pSport 1 | LP014 |
| HWLM HWLN | Colon Tumor | pSport 1 | LP014 |
| HVAM HVAN HVAO | Pancreas Tumor | pSport 1 | LP014 |
| HWGQ | Larynx carcinoma | pSport 1 | LP014 |
| HAQM HAQN | Salivary Gland | pSport 1 | LP014 |
| HASM | Stomach; normal | pSport 1 | LP014 |
| HBCM | Uterus; normal | pSport 1 | LP014 |
| HCDM | Testis; normal | pSport 1 | LP014 |
| HDJM | Brain; normal | pSport 1 | LP014 |
| HEFM | Adrenal Gland, normal | pSport 1 | LP014 |
| HBAA | Rectum normal | pSport 1 | LP014 |
| HFDM | Rectum tumour | pSport 1 | LP014 |
| HGAM | Colon, normal | pSport 1 | LP014 |
| HHMM | Colon, tumour | pSport 1 | LP014 |
| HCLB HCLC | Human Lung Cancer | Lambda Zap II | LP015 |
| HRLA | L1 Cell line | ZAP Express | LP015 |
| HHAM | Hypothalamus, Alzheimer's | pCMVSport 3.0 | LP015 |
| HKBA | Ku 812F Basophils Line | pSport 1 | LP015 |
| HS2S | Saos2, Dexamethosome Treated | pSport 1 | LP016 |
| HA5A | Lung Carcinoma A549 TNFalpha | pSport 1 | LP016 |
| | activated | | |
| HTFM | TF-1 Cell Line GM-CSF Treated | pSport 1 | LP016 |
| HYAS | Thyroid Tumour | pSport 1 | LP016 |
| HUTS | Larynx Normal | pSport 1 | LP016 |
| HXOA | Larynx Tumor | pSport 1 | LP016 |
| HEAH | Ea.hy.926 cell line | pSport 1 | LP016 |
| HINA | Adenocarcinoma Human | pSport 1 | LP016 |
| HRMA | Lung Mesothelium | pSport 1 | LP016 |
| HLCL | Human Pre-Differentiated Adipocytes | Uni-Zap XR | LP017 |
| HS2A | Saos2 Cells | pSport 1 | LP020 |
| HS2I | Saos2 Cells; Vitamin D3 Treated | pSport 1 | LP020 |
| HUCM | CHME Cell Line, untreated | pSport 1 | LP020 |
| HEPN | Aryepiglottis Normal | pSport 1 | LP020 |
| HPSN | Sinus Piniformis Tumour | pSport 1 | LP020 |
| HNSA | Stomach Normal | pSport 1 | LP020 |
| HNSM | Stomach Tumour | pSport 1 | LP020 |
| HNLA | Liver Normal Met5No | pSport 1 | LP020 |
| HUTA | Liver Tumour Met 5 Tu | pSport 1 | LP020 |
| HOCN | Colon Normal | pSport 1 | LP020 |
| HOCT | Colon Tumor | pSport 1 | LP020 |
| HTNT | Tongue Tumour | pSport 1 | LP020 |
| HLXN | Larynx Normal | pSport 1 | LP020 |
| HLXT | Larynx Tumour | pSport 1 | LP020 |
| HTYN | Thymus | pSport 1 | LP020 |
| HPLN | Placenta | pSport 1 | LP020 |
| HTNG | Tongue Normal | pSport 1 | LP020 |
| HZAA | Thyroid Normal (SDCA2 No) | pSport 1 | LP020 |
| HWES | Thyroid Thyroiditis | pSport 1 | LP020 |
| HFHD | Ficolled Human Stromal Cells, 5Fu | pTriplEx2 | LP021 |
| | treated | | |
| HFHM,HFHN | Ficolled Human Stromal Cells, | pTriplEx2 | LP021 |
| | Untreated | | |
| HPCI | Hep G2 Cells, lambda library | lambda Zap-CMV XR | LP021 |
| HBCA,HBCB,HBCC | H. Lymph node breast Cancer | Uni-ZAP XR | LP021 |
| HCOK | Chondrocytes | pSPORT1 | LP022 |
| HDCA, HDCB, HDCC | Dendritic Cells From CD34 Cells | pSPORT1 | LP022 |
| HDMA, HDMB | CD40 activated monocyte dendritic | pSPORT1 | LP022 |
| | cells | | |
| HDDM, HDDN, HDDO | LPS activated derived dendritic cells | pSPORT1 | LP022 |
| HPCR | Hep G2 Cells, PCR library | lambda Zap-CMV XR | LP022 |
| HAAA, HAAB, HAAC | Lung, Cancer (4005313A3): Invasive | pSPORT1 | LP022 |
| | Poorly Differentiated Lung | | |
| | Adenocarcinoma | | |
| HIPA, HIPB, HIPC | Lung, Cancer (4005163 B7): Invasive, | pSPORT1 | LP022 |
| | Poorly Diff. Adenocarcinoma, | | |
| | Metastatic | | |
| HOOH, HOOI | Ovary, Cancer: (4004562 B6) Papillary | pSPORT1 | LP022 |
| | Serous Cystic Neoplasm, Low | | |
| | Malignant Pot | | |
| HIDA | Lung, Normal: (4005313 B1) | pSPORT1 | LP022 |
| HUJA,HUJB,HUJC,HUJD,HUJE | B-Cells | pCMVSport 3.0 | LP022 |
| HNOA,HNOB,HNOC,HNOD | Ovary, Normal: (9805C040R) | pSPORT1 | LP022 |
| HNLM | Lung, Normal: (4005313 B1) | pSPORT1 | LP022 |
| HSCL | Stromal Cells | pSPORT1 | LP022 |
| HAAX | Lung, Cancer (4005313 A3) Invasive | pSPORT1 | LP022 |
| | Poorly-differentiated Metastatic lung | | |
| | adenocarcinoma | | |
| HUUA,HUUB,HUUC,HUUD | B-cells (unstimulated) | pTriplEx2 | LP022 |
| HWWA,HWWB,HWWC,HWWD,H | B-cells (stimulated) | pSPORT1 | LP022 |
| WWE,HWWF,HWWG | | | |
| HCCC | Colon, Cancer: (9808C064R) | pCMVSport 3.0 | LP023 |
| HPDO HPDP HPDQ HPDR HPD | Ovary, Cancer (9809C332): Poorly | pSport 1 | LP023 |
| | differentiated adenocarcinoma | | |
| HPCO HPCP HPCQ HPCT | Ovary, Cancer (15395A1F): Grade II | pSport 1 | LP023 |
| | Papillary Carcinoma | | |
| HOCM HOCO HOCP HOCQ | Ovary, Cancer: (15799A1F) Poorly | pSport 1 | LP023 |
| | differentiated carcinoma | | |
| HCBM HCBN HCBO | Breast, Cancer: (4004943 A5) | pSport 1 | LP023 |
| HNBT HNBU HNBV | Breast, Normal: (4005522B2) | pSport 1 | LP023 |
| HBCP HBCQ | Breast, Cancer: (4005522 A2) | pSport 1 | LP023 |
| HBCJ | Breast, Cancer: (9806C012R) | pSport 1 | LP023 |
| HSAM HSAN | Stromal cells 3.88 | pSport 1 | LP023 |
| HVCA HVCB HVCC HVCD | Ovary, Cancer: (4004332 A2) | pSport 1 | LP023 |
| HSCK HSEN HSEO | Stromal cells (HBM3.18) | pSport 1 | LP023 |
| HSCP HSCQ | stromal cell clone 2.5 | pSport 1 | LP023 |
| HUXA | Breast Cancer: (4005385 A2) | pSport 1 | LP023 |
| HCOM HCON HCOO HCOP HCOQ | Ovary, Cancer (4004650 A3): Well- | pSport 1 | LP023 |
| | Differentiated Micropapillary Serous | | |
| | Carcinoma | | |
| HBNM | Breast, Cancer: (9802C020E) | pSport 1 | LP023 |
| HVVA HVVB HVVC HVVD HVVE | Human Bone Marrow, treated | pSport 1 | LP023 |

[0935] Two nonlimiting examples are provided below for isolating a particular clone from the deposited sample of plasmid cDNAs cited for that clone in Table 7. First, a plasmid is directly isolated by screening the clones using a polynucleotide probe corresponding to the nucleotide sequence of SEQ ID NO:X.

[0936] Particularly, a specific polynucleotide with 30-40 nucleotides is synthesized using an Applied Biosystems DNA synthesizer according to the sequence reported. The oligonucleotide is labeled, for instance, with ³²P-γ-ATP using T4 polynucleotide kinase and purified according to routine methods. (E.g., Maniatis et al., Molecular Cloning: A Laboratory Manual, Cold Spring Harbor Press, Cold Spring, N.Y. (1982).) The plasmid mixture is transformed into a suitable host, as indicated above (such as XL-1 Blue (Stratagene)) using techniques known to those of skill in the art, such as those provided by the vector supplier or in related publications or patents cited above. The transformants are plated on 1.5% agar plates (containing the appropriate selection agent, e.g., ampicillin) to a density of about 150 transformants (colonies) per plate. These plates are screened using Nylon membranes according to routine methods for bacterial colony screening (e.g., Sambrook et al., Molecular Cloning: A Laboratory Manual, 2nd Edit., (1989), Cold Spring Harbor Laboratory Press, pages 1.93 to 1.104), or other techniques known to those of skill in the art.

[0937] Alternatively, two primers of 17-20 nucleotides derived from both ends of the nucleotide sequence of SEQ ID NO:X are synthesized and used to amplify the desired cDNA using the deposited cDNA plasmid as a template. The polymerase chain reaction is carried out under routine conditions, for instance, in 25 μl of reaction mixture with 0.5 ug of the above cDNA template. A convenient reaction mixture is 1.5-5 mM MgCl₂, 0.01% (w/v) gelatin, 20 μM each of dATP, dCTP, dGTP, dTTP, 25 pmol of each primer and 0.25 Unit of Taq polymerase. Thirty five cycles of PCR (denaturation at 94° C. for 1 min; annealing at 55° C. for 1 min; elongation at 72° C. for 1 min) are performed with a Perkin-Elmer Cetus automated thermal cycler. The amplified product is analyzed by agarose gel electrophoresis and the DNA band with expected molecular weight is excised and purified. The PCR product is verified to be the selected sequence by subcloning and sequencing the DNA product.

[0938] Several methods are available for the identification of the 5′ or 3′ non-coding portions of a gene which may not be present in the deposited clone. These methods include but are not limited to, filter probing, clone enrichment using specific probes, and protocols similar or identical to 5′ and 3′ “RACE” protocols which are well known in the art. For instance, a method similar to 5′ RACE is available for generating the missing 5′ end of a desired full-length transcript. (Fromont-Racine et al., Nucleic Acids Res. 21(7):1683-1684 (1993).)

[0939] Briefly, a specific RNA oligonucleotide is ligated to the 5′ ends of a population of RNA presumably containing full-length gene RNA transcripts. A primer set containing a primer specific to the ligated RNA oligonucleotide and a primer specific to a known sequence of the gene of interest is used to PCR amplify the 5′ portion of the desired full-length gene. This amplified product may then be sequenced and used to generate the full length gene.

[0940] This above method starts with total RNA isolated from the desired source, although poly-A+ RNA can be used. The RNA preparation can then be treated with phosphatase if necessary to eliminate 5′ phosphate groups on degraded or damaged RNA which may interfere with the later RNA ligase step. The phosphatase should then be inactivated and the RNA treated with tobacco acid pyrophosphatase in order to remove the cap structure present at the 5′ ends of messenger RNAs. This reaction leaves a 5′ phosphate group at the 5′ end of the cap cleaved RNA which can then be ligated to an RNA oligonucleotide using T4 RNA ligase.

[0941] This modified RNA preparation is used as a template for first strand cDNA synthesis using a gene specific oligonucleotide. The first strand synthesis reaction is used as a template for PCR amplification of the desired 5′ end using a primer specific to the ligated RNA oligonucleotide and a primer specific to the known sequence of the gene of interest. The resultant product is then sequenced and analyzed to confirm that the 5′ end sequence belongs to the desired gene.

### Example 2

[0942] Isolation of Genomic Clones Corresponding to a Polynucleotide

[0943] A human genomic P1 library (Genomic Systems, Inc.) is screened by PCR using primers selected for the sequence corresponding to SEQ ID NO:X according to the method described in Example 1. (See also, Sambrook et al., Molecular Cloning: A Laboratory Manual, 2nd Edn., (1989), Cold Spring Harbor Laboratory Press).

### Example 3

[0944] Tissue Specific Expression Analysis

[0945] The Human Genome Sciences, Inc. (HGS) database is derived from sequencing tissue and/or disease specific cDNA libraries. Libraries generated from a particular tissue are selected and the specific tissue expression pattern of EST groups or assembled contigs within these libraries is determined by comparison of the expression patterns of those groups or contigs within the entire database. ESTs and assembled contigs which show tissue specific expression are selected.

[0946] The original clone from which the specific EST sequence was generated, or in the case of an assembled contig, the clone from which the 5′ most EST sequence was generated, is obtained from the catalogued library of clones and the insert amplified by PCR using methods known in the art. The PCR product is denatured and then transferred in 96 or 384 well format to a nylon membrane (Schleicher and Scheull) generating an array filter of tissue specific clones. Housekeeping genes, maize genes, and known tissue specific genes are included on the filters. These targets can be used in signal normalization and to validate assay sensitivity. Additional targets are included to monitor probe length and specificity of hybridization.

[0947] Radioactively labeled hybridization probes are generated by first strand cDNA synthesis per the manufacturer's instructions (Life Technologies) from mRNA/RNA samples prepared from the specific tissue being analyzed (e.g., pharnyx, nasopharyngeal cancer, tonsil, tonsil cancer, larynx, larynx cancer, trachea, tracheal cancer, lung, lung cancer, nose, nose cancer, prostate, prostate cancer, ovarian, ovarian cancer, etc.). The hybridization probes are purified by gel exclusion chromatography, quantitated, and hybridized with the array filters in hybridization bottles at 65° C. overnight. The filters are washed under stringent conditions and signals are captured using a Fuji phosphorimager.

[0948] Data is extracted using AIS software and following background subtraction, signal normalization is performed. This includes a normalization of filter-wide expression levels between different experimental runs. Genes that are differentially expressed in the tissue of interest are identified.

### Example 4

[0949] Chromosomal Mapping of the Polynucleotides

[0950] An oligonucleotide primer set is designed according to the sequence at the 5′ end of SEQ ID NO:X. This primer preferably spans about 100 nucleotides. This primer set is then used in a polymerase chain reaction under the following set of conditions: 30 seconds, 95° C.; 1 minute, 56° C.; 1 minute, 70° C. This cycle is repeated 32 times followed by one 5 minute cycle at 70° C. Human, mouse, and hamster DNA is used as template in addition to a somatic cell hybrid panel containing individual chromosomes or chromosome fragments (Bios, Inc). The reactions are analyzed on either 8% polyacrylamide gels or 3.5% agarose gels. Chromosome mapping is determined by the presence of an approximately 100 bp PCR fragment in the particular somatic cell hybrid.

### Example 5

[0951] Bacterial Expression of a Polypeptide

[0952] A polynucleotide encoding a polypeptide of the present invention is amplified using PCR oligonucleotide primers corresponding to the 5′ and 3′ ends of the DNA sequence, as outlined in Example 1, to synthesize insertion fragments. The primers used to amplify the cDNA insert should preferably contain restriction sites, such as BamHI and XbaI, at the 5′ end of the primers in order to clone the amplified product into the expression vector. For example, BamHl and XbaI correspond to the restriction enzyme sites on the bacterial expression vector pQE-9. (Qiagen, Inc., Chatsworth, Calif.). This plasmid vector encodes antibiotic resistance (Amp^{r}), a bacterial origin of replication (ori), an IPTG-regulatable promoter/operator (P/O), a ribosome binding site (RBS), a 6-histidine tag (6-His), and restriction enzyme cloning sites.

[0953] The pQE-9 vector is digested with BamHI and XbaI and the amplified fragment is ligated into the pQE-9 vector maintaining the reading frame initiated at the bacterial RBS. The ligation mixture is then used to transform the E. coli strain M15/rep4 (Qiagen, Inc.) which contains multiple copies of the plasmid pREP4, which expresses the lacI repressor and also confers kanamycin resistance (Kan^{r}). Transformants are identified by their ability to grow on LB plates and ampicillin/kanamycin resistant colonies are selected. Plasmid DNA is isolated and confirmed by restriction analysis.

[0954] Clones containing the desired constructs are grown overnight (O/N) in liquid culture in LB media supplemented with both Amp (100 ug/ml) and Kan (25 ug/ml). The O/N culture is used to inoculate a large culture at a ratio of 1:100 to 1:250. The cells are grown to an optical density 600 (O.D.⁶⁰⁰) of between 0.4 and 0.6. IPTG (Isopropyl-B-D-thiogalacto pyranoside) is then added to a final concentration of 1 mM. IPTG induces by inactivating the lacI repressor, clearing the P/O leading to increased gene expression.

[0955] Cells are grown for an extra 3 to 4 hours. Cells are then harvested by centrifugation (20 mins at 6000×g). The cell pellet is solubilized in the chaotropic agent 6 Molar Guanidine HCl by stirring for 3-4 hours at 4° C. The cell debris is removed by centrifugation, and the supernatant containing the polypeptide is loaded onto a nickelnitrilo-tri-acetic acid (“Ni-NTA”) affinity resin column (available from QIAGEN, Inc., supra). Proteins with a 6×His tag bind to the Ni-NTA resin with high affinity and can be purified in a simple one-step procedure (for details see: The QIAexpressionist (1995) QIAGEN, Inc., supra).

[0956] Briefly, the supernatant is loaded onto the column in 6 M guanidine-HCl, pH 8. The column is first washed with 10 volumes of 6 M guanidine-HCl, pH 8, then washed with 10 volumes of 6 M guanidine-HCl pH 6, and finally the polypeptide is eluted with 6 M guanidine-HCl, pH 5.

[0957] The purified protein is then renatured by dialyzing it against phosphate-buffered saline (PBS) or 50 mM Na-acetate, pH 6 buffer plus 200 mM NaCl. Alternatively, the protein can be successfully refolded while immobilized on the Ni-NTA column. The recommended conditions are as follows: renature using a linear 6M-1M urea gradient in 500 mM NaCl, 20% glycerol, 20 mM Tris/HCI pH 7.4, containing protease inhibitors. The renaturation should be performed over a period of 1.5 hours or more. After renaturation the proteins are eluted by the addition of 250 mM immidazole. Immidazole is removed by a final dialyzing step against PBS or 50 mM sodium acetate pH 6 buffer plus 200 mM NaCl. The purified protein is stored at 4° C. or frozen at −80° C.

[0958] In addition to the above expression vector, the present invention further includes an expression vector, called pHE4a (ATCC Accession Number 209645, deposited on Feb. 25, 1998) which contains phage operator and promoter elements operatively linked to a polynucleotide of the present invention. This vector contains: 1) a neomycinphosphotransferase gene as a selection marker, 2) an E. coli origin of replication, 3) a T5 phage promoter sequence, 4) two lac operator sequences, 5) a Shine-Delgarno sequence, and 6) the lactose operon repressor gene (lacIq). The origin of replication (oriC) is derived from pUC19 (LTI, Gaithersburg, Md.). The promoter and operator sequences are made synthetically.

[0959] DNA can be inserted into the pHE4a by restricting the vector with NdeI and XbaI, BamHI, XhoI, or Asp718, running the restricted product on a gel, and isolating the larger fragment (the stuffer fragment should be about 310 base pairs). The DNA insert is generated according to the PCR protocol described in Example 1, using PCR primers having restriction sites for NdeI (5′ primer) and XbaI, BamHI, XhoI, or Asp718 (3′ primer). The PCR insert is gel purified and restricted with compatible enzymes. The insert and vector are ligated according to standard protocols.

[0960] The engineered vector could easily be substituted in the above protocol to express protein in a bacterial system.

### Example 6

[0961] Purification of a Polypeptide from an Inclusion Body

[0962] The following alternative method can be used to purify a polypeptide expressed in E coli when it is present in the form of inclusion bodies. Unless otherwise specified, all of the following steps are conducted at 4-10° C.

[0963] Upon completion of the production phase of the E. coli fermentation, the cell culture is cooled to 4-10° C. and the cells harvested by continuous centrifugation at 15,000 rpm (Heraeus Sepatech). On the basis of the expected yield of protein per unit weight of cell paste and the amount of purified protein required, an appropriate amount of cell paste, by weight, is suspended in a buffer solution containing 100 mM Tris, 50 mM EDTA, pH 7.4. The cells are dispersed to a homogeneous suspension using a high shear mixer.

[0964] The cells are then lysed by passing the solution through a microfluidizer (Microfuidics, Corp. or APV Gaulin, Inc.) twice at 4000-6000 psi. The homogenate is then mixed with NaCl solution to a final concentration of 0.5 M NaCl, followed by centrifugation at 7000×g for 15 min. The resultant pellet is washed again using 0.5M NaCl, 100 mM Tris, 50 mM EDTA, pH 7.4.

[0965] The resulting washed inclusion bodies are solubilized with 1.5 M guanidine hydrochloride (GuHCl) for 2-4 hours. After 7000×g centrifugation for 15 min., the pellet is discarded and the polypeptide containing supernatant is incubated at 4° C. overnight to allow further GuHCl extraction.

[0966] Following high speed centrifugation (30,000×g) to remove insoluble particles, the GuHCl solubilized protein is refolded by quickly mixing the GuHCl extract with 20 volumes of buffer containing 50 mM sodium, pH 4.5, 150 mM NaCl, 2 mM EDTA by vigorous stirring. The refolded diluted protein solution is kept at 4° C. without mixing for 12 hours prior to further purification steps.

[0967] To clarify the refolded polypeptide solution, a previously prepared tangential filtration unit equipped with 0.16 μm membrane filter with appropriate surface area (e.g., Filtron), equilibrated with 40 mM sodium acetate, pH 6.0 is employed. The filtered sample is loaded onto a cation exchange resin (e.g., Poros HS-50, Perseptive Biosystems). The column is washed with 40 mM sodium acetate, pH 6.0 and eluted with 250 mM, 500 mM, 1000 mM, and 1500 mM NaCl in the same buffer, in a stepwise manner. The absorbance at 280 nm of the effluent is continuously monitored. Fractions are collected and further analyzed by SDS-PAGE.

[0968] Fractions containing the polypeptide are then pooled and mixed with 4 volumes of water. The diluted sample is then loaded onto a previously prepared set of tandem columns of strong anion (Poros HQ-50, Perseptive Biosystems) and weak anion (Poros CM-20, Perseptive Biosystems) exchange resins. The columns are equilibrated with 40 mM sodium acetate, pH 6.0. Both columns are washed with 40 mM sodium acetate, pH 6.0, 200 mM NaCl. The CM-20 column is then eluted using a 10 column volume linear gradient ranging from 0.2 M NaCl, 50 mM sodium acetate, pH 6.0 to 1.0 M NaCl, 50 mM sodium acetate, pH 6.5. Fractions are collected under constant A₂₈₀ monitoring of the effluent. Fractions containing the polypeptide (determined, for instance, by 16% SDS-PAGE) are then pooled.

[0969] The resultant polypeptide should exhibit greater than 95% purity after the above refolding and purification steps. No major contaminant bands should be observed from Commassie blue stained 16% SDS-PAGE gel when 5 μg of purified protein is loaded. The purified protein can also be tested for endotoxin/LPS contamination, and typically the LPS content is less than 0.1 ng/ml according to LAL assays.

### Example 7

[0970] Cloning and Expression of a Polypeptide in a Baculovirus Expression System

[0971] In this example, the plasmid shuttle vector pA2 is used to insert a polynucleotide into a baculovirus to express a polypeptide. This expression vector contains the strong polyhedrin promoter of the Autographa californica nuclear polyhedrosis virus (AcMNPV) followed by convenient restriction sites such as BamHI, Xba I and Asp718. The polyadenylation site of the simian virus 40 (“SV40”) is used for efficient polyadenylation. For easy selection of recombinant virus, the plasmid contains the beta-galactosidase gene from E. coli under control of a weak Drosophila promoter in the same orientation, followed by the polyadenylation signal of the polyhedrin gene. The inserted genes are flanked on both sides by viral sequences for cell-mediated homologous recombination with wild-type viral DNA to generate a viable virus that express the cloned polynucleotide.

[0972] Many other baculovirus vectors can be used in place of the vector above, such as pAc373, pVL941, and pAcIM1, as one skilled in the art would readily appreciate, as long as the construct provides appropriately located signals for transcription, translation, secretion and the like, including a signal peptide and an in-frame AUG as required. Such vectors are described, for instance, in Luckow et al., Virology 170:31-39 (1989).

[0973] Specifically, the cDNA sequence contained in the deposited clone, including the AUG initiation codon, is amplified using the PCR protocol described in Example 1. If a naturally occurring signal sequence is used to produce the polypeptide of the present invention, the pA2 vector does not need a second signal peptide. Alternatively, the vector can be modified (pA2 GP) to include a baculovirus leader sequence, using the standard methods described in Summers et al., “A Manual of Methods for Baculovirus Vectors and Insect Cell Culture Procedures,” Texas Agricultural Experimental Station Bulletin No. 1555 (1987).

[0974] The amplified fragment is isolated from a 1% agarose gel using a commercially available kit (“Geneclean,” BIO 101 Inc., La Jolla, Calif.). The fragment then is digested with appropriate restriction enzymes and again purified on a 1% agarose gel.

[0975] The plasmid is digested with the corresponding restriction enzymes and optionally, can be dephosphorylated using calf intestinal phosphatase, using routine procedures known in the art. The DNA is then isolated from a 1% agarose gel using a commercially available kit (“Geneclean” BIO 101 Inc., La Jolla, Calif.).

[0976] The fragment and the dephosphorylated plasmid are ligated together with T4 DNA ligase. E. coli HB101 or other suitable E. coli hosts such as XL-1 Blue (Stratagene Cloning Systems, La Jolla, Calif.) cells are transformed with the ligation mixture and spread on culture plates. Bacteria containing the plasmid are identified by digesting DNA from individual colonies and analyzing the digestion product by gel electrophoresis. The sequence of the cloned fragment is confirmed by DNA sequencing.

[0977] Five μg of a plasmid containing the polynucleotide is co-transfected with 1.0 μg of a commercially available linearized baculovirus DNA (“BaculoGold™ baculovirus DNA”, Pharmingen, San Diego, Calif.), using the lipofection method described by Felgner et al., Proc. Natl. Acad. Sci. USA 84:7413-7417 (1987). One μg of BaculoGold™ virus DNA and 5 μg of the plasmid are mixed in a sterile well of a microtiter plate containing 50 μl of serum-free Grace's medium (Life Technologies Inc., Gaithersburg, Md.). Afterwards, 10 μl Lipofectin plus 90 μl Grace's medium are added, mixed and incubated for 15 minutes at room temperature. Then the transfection mixture is added drop-wise to Sf9 insect cells (ATCC CRL 1711) seeded in a 35 mm tissue culture plate with 1 ml Grace's medium without serum. The plate is then incubated for 5 hours at 27° C. The transfection solution is then removed from the plate and 1 ml of Grace's insect medium supplemented with 10% fetal calf serum is added. Cultivation is then continued at 27° C. for four days.

[0978] After four days the supernatant is collected and a plaque assay is performed, as described by Summers and Smith, supra. An agarose gel with “Blue Gal” (Life Technologies Inc., Gaithersburg) is used to allow easy identification and isolation of gal-expressing clones, which produce blue-stained plaques. (A detailed description of a “plaque assay” of this type can also be found in the user's guide for insect cell culture and baculovirology distributed by Life Technologies Inc., Gaithersburg, page 9-10.) After appropriate incubation, blue stained plaques are picked with the tip of a micropipettor (e.g., Eppendorf). The agar containing the recombinant viruses is then resuspended in a microcentrifuge tube containing 200 μl of Grace's medium and the suspension containing the recombinant baculovirus is used to infect Sf9 cells seeded in 35 mm dishes. Four days later the supernatants of these culture dishes are harvested and then they are stored at 4° C.

[0979] To verify the expression of the polypeptide, Sf9 cells are grown in Grace's medium supplemented with 10% heat-inactivated FBS. The cells are infected with the recombinant baculovirus containing the polynucleotide at a multiplicity of infection (“MOI”) of about 2. If radiolabeled proteins are desired, 6 hours later the medium is removed and is replaced with SF900 II medium minus methionine and cysteine (available from Life Technologies Inc., Rockville, Md.). After 42 hours, 5 μCi of ³⁵S-methionine and 5 μCi ³⁵S-cysteine (available from Amersham) are added. The cells are further incubated for 16 hours and then are harvested by centrifugation. The proteins in the supernatant as well as the intracellular proteins are analyzed by SDS-PAGE followed by autoradiography (if radiolabeled).

[0980] Microsequencing of the amino acid sequence of the amino terminus of purified protein may be used to determine the amino terminal sequence of the produced protein.

### Example 8

[0981] Expression of a Polypeptide in Mammalian Cells

[0982] The polypeptide of the present invention can be expressed in a mammalian cell. A typical mammalian expression vector contains a promoter element, which mediates the initiation of transcription of mRNA, a protein coding sequence, and signals required for the termination of transcription and polyadenylation of the transcript. Additional elements include enhancers, Kozak sequences and intervening sequences flanked by donor and acceptor sites for RNA splicing. Highly efficient transcription is achieved with the early and late promoters from SV40, the long terminal repeats (LTRs) from Retroviruses, e.g., RSV, HTLVI, HIVI and the early promoter of the cytomegalovirus (CMV). However, cellular elements can also be used (e.g., the human actin promoter).

[0983] Suitable expression vectors for use in practicing the present invention include, for example, vectors such as pSVL and pMSG (Pharmacia, Uppsala, Sweden), pRSVcat (ATCC 37152), pSV2dhfr (ATCC 37146), pBC12MI (ATCC 67109), pCMVSport 2.0, and pCMVSport 3.0. Mammalian host cells that could be used include, human Hela, 293, H9 and Jurkat cells, mouse NIH3T3 and C127 cells, Cos 1, Cos 7 and CV1, quail QC1-3 cells, mouse L cells and Chinese hamster ovary (CHO) cells.

[0984] Alternatively, the polypeptide can be expressed in stable cell lines containing the polynucleotide integrated into a chromosome. The co-transfection with a selectable marker such as DHFR, gpt, neomycin, or hygromycin allows the identification and isolation of the transfected cells.

[0985] The transfected gene can also be amplified to express large amounts of the encoded protein. The DHFR (dihydrofolate reductase) marker is useful in developing cell lines that carry several hundred or even several thousand copies of the gene of interest. (See, e.g., Alt, F. W., et al., J. Biol. Chem. 253:1357-1370 (1978); Hamlin, J. L. and Ma, C., Biochem. et Biophys. Acta, 1097:107-143 (1990); Page, M. J. and Sydenham, M. A., Biotechnology 9:64-68 (1991).) Another useful selection marker is the enzyme glutamine synthase (GS) (Murphy et al., Biochem J. 227:277-279 (1991); Bebbington et al., Bio/Technology 10:169-175 (1992). Using these markers, the mammalian cells are grown in selective medium and the cells with the highest resistance are selected. These cell lines contain the amplified gene(s) integrated into a chromosome. Chinese hamster ovary (CHO) and NSO cells are often used for the production of proteins.

[0986] Derivatives of the plasmid pSV2-dhfr (ATCC Accession No. 37146), the expression vectors pC4 (ATCC Accession No. 209646) and pC6 (ATCC Accession No.209647) contain the strong promoter (LTR) of the Rous Sarcoma Virus (Cullen et al., Molecular and Cellular Biology, 438-447 (March, 1985)) plus a fragment of the CMV-enhancer (Boshart et al., Cell 41:521-530 (1985).) Multiple cloning sites, e.g., with the restriction enzyme cleavage sites BamHI, XbaI and Asp718, facilitate the cloning of the gene of interest. The vectors also contain the 3′ intron, the polyadenylation and termination signal of the rat preproinsulin gene, and the mouse DHFR gene under control of the SV40 early promoter.

[0987] Specifically, the plasmid pC6, for example, is digested with appropriate restriction enzymes and then dephosphorylated using calf intestinal phosphates by procedures known in the art. The vector is then isolated from a 1% agarose gel.

[0988] A polynucleotide of the present invention is amplified according to the protocol outlined in Example 1. If a naturally occurring signal sequence is used to produce the polypeptide of the present invention, the vector does not need a second signal peptide. Alternatively, if a naturally occurring signal sequence is not used, the vector can be modified to include a heterologous signal sequence. (See, e.g., International Publication No. WO 96/34891.)

[0989] The amplified fragment is isolated from a 1% agarose gel using a commercially available kit (“Geneclean,” BIO 101 Inc., La Jolla, Calif.). The fragment then is digested with appropriate restriction enzymes and again purified on a 1% agarose gel.

[0990] The amplified fragment is then digested with the same restriction enzyme and purified on a 1% agarose gel. The isolated fragment and the dephosphorylated vector are then ligated with T4 DNA ligase. E. coli HB101 XL-1 Blue cells are then transformed and bacteria are identified that contain the fragment inserted into plasmid pC6 using, for instance, restriction enzyme analysis.

[0991] Chinese hamster ovary cells lacking an active DHFR gene is used for transfection. Five μg of the expression plasmid pC6 or pC4 is cotransfected with 0.5 μg of the plasmid pSVneo using lipofectin (Felgner et al., supra). The plasmid pSV2-neo contains a dominant selectable marker, the neo gene from Tn5 encoding an enzyme that confers resistance to a group of antibiotics including G418. The cells are seeded in alpha minus MEM supplemented with 1 mg/ml G418. After 2 days, the cells are trypsinized and seeded in hybridoma cloning plates (Greiner, Germany) in alpha minus MEM supplemented with 10, 25, or 50 ng/ml of methotrexate plus 1 mg/ml G418. After about 10-14 days single clones are trypsinized and then seeded in 6-well petri dishes or 10 ml flasks using different concentrations of methotrexate (50 nM, 100 nM, 200 nM, 400 nM, 800 nM). Clones growing at the highest concentrations of methotrexate are then transferred to new 6-well plates containing even higher concentrations of methotrexate (1 μM, 2 μM, 5 μM, 10 mM, 20 mM). The same procedure is repeated until clones are obtained which grow at a concentration of 100-200 μM. Expression of the desired gene product is analyzed, for instance, by SDS-PAGE and Western blot or by reversed phase HPLC analysis.

### Example 9

[0992] Protein Fusions

[0993] The polypeptides of the present invention are preferably fused to other proteins. These fusion proteins can be used for a variety of applications. For example, fusion of the present polypeptides to His-tag, HA-tag, protein A, IgG domains, and maltose binding protein facilitates purification. (See Example 5; see also EP A 394,827; Traunecker, et al., Nature 331:84-86 (1988).) Similarly, fusion to IgG-1, IgG-3, and albumin increases the halflife time in vivo. Nuclear localization signals fused to the polypeptides of the present invention can target the protein to a specific subcellular localization, while covalent heterodimer or homodimers can increase or decrease the activity of a fusion protein. Fusion proteins can also create chimeric molecules having more than one function. Finally, fusion proteins can increase solubility and/or stability of the fused protein compared to the non-fused protein. All of the types of fusion proteins described above can be made by modifying the following protocol, which outlines the fusion of a polypeptide to an IgG molecule, or the protocol described in Example 5.

[0994] Briefly, the human Fc portion of the IgG molecule can be PCR amplified, using primers that span the 5′ and 3′ ends of the sequence described below. These primers also should have convenient restriction enzyme sites that will facilitate cloning into an expression vector, preferably a mammalian expression vector.

[0995] For example, if pC4 (ATCC Accession No. 209646) is used, the human Fc portion can be ligated into the BamHI cloning site. Note that the 3′ BamHI site should be destroyed. Next, the vector containing the human Fc portion is re-restricted with BamHI, linearizing the vector, and a polynucleotide of the present invention, isolated by the PCR protocol described in Example 1, is ligated into this BamHI site. Note that the polynucleotide is cloned without a stop codon, otherwise a fusion protein will not be produced.

[0996] If the naturally occurring signal sequence is used to produce the polypeptide of the present invention, pC4 does not need a second signal peptide. Alternatively, if the naturally occurring signal sequence is not used, the vector can be modified to include a heterologous signal sequence. (See, e.g., International Publication No. WO 96/34891.)

| | |
|---|---|
| Human IgG Fc region: | |
| GGGATCCGGAGCCCAAATCTTCTGACAAAACTCACACATGCCCACCGTGCCCA | (SEQ ID NO: 1) |
| GCACCTGAATTCGAGGGTGCACCGTCAGTCTTCCTCTTCCCCCCAAAACCCAAG | |
| GACACCCTCATGATCTCCCGGACTCCTGAGGTCACATGCGTGGTGGTGGACGTA | |
| AGCCACGAAGACCCTGAGGTCAAGTTCAACTGGTACGTGGACGGCGTGGAGGT | |
| GCATAATGCCAAGACAAAGCCGCGGGAGGAGCAGTACAACAGCACGTACCGT | |
| GTGGTCAGCGTCCTCACCGTCCTGCACCAGGACTGGCTGAATGGCAAGGAGTA | |
| CAAGTGCAAGGTCTCCAACAAAGCCCTCCCAACCCCCATCGAGAAAACCATCT | |
| CCAAAGCCAAAGGGCAGCCCCGAGAACCACAGGTGTACACCCTGCCCCCATCC | |
| CGGGATGAGCTGACCAAGAACCAGGTCAGCCTGACCTGCCTGGTCAAAGGCTT | |
| CTATCCAAGCGACATCGCCGTGGAGTGGGAGAGCAATGGGCAGCCGGAGAAC | |
| AACTACAAGACCACGCCTCCCGTGCTGGACTCCGACGGCTCCTTCTTCCTCTAC | |
| AGCAAGCTCACCGTGGACAAGAGCAGGTGGCAGCAGGGGAACGTCTTCTCATG | |
| CTCCGTGATGCATGAGGCTCTGCACAACCACTACACGCAGAAGAGCCTCTCCCT | |
| GTCTCCGGGTAAATGAGTGCGACGGCCGCGACTCTAGAGGAT | |

### Example 10

[0997] Production of an Antibody from a Polypeptide

[0998] Hybridoma Technology

[0999] The antibodies of the present invention can be prepared by a variety of methods. (See, Current Protocols, Chapter 2.) As one example of such methods, cells expressing polypeptide of the present invention are administered to an animal to induce the production of sera containing polyclonal antibodies. In a preferred method, a preparation of polypeptide of the present invention is prepared and purified to render it substantially free of natural contaminants. Such a preparation is then introduced into an animal in order to produce polyclonal antisera of greater specific activity.

[1000] Monoclonal antibodies specific for polypeptide of the present invention are prepared using hybridoma technology (Kohler et al., Nature 256:495 (1975); Kohler et al., Eur. J. Immunol. 6:511 (1976); Kohler et al., Eur. J. Immunol. 6:292 (1976); Hammerling et al., in: Monoclonal Antibodies and T-Cell Hybridomas, Elsevier, N.Y., pp. 563-681 (1981)). In general, an animal (preferably a mouse) is immunized with polypeptide of the present invention or, more preferably, with a secreted polypeptide of the present invention-expressing cell. Such polypeptide-expressing cells are cultured in any suitable tissue culture medium, preferably in Earle's modified Eagle's medium supplemented with 10% fetal bovine serum (inactivated at about 56° C.), and supplemented with about 10 g/l of nonessential amino acids, about 1,000 U/ml of penicillin, and about 100 μg/ml of streptomycin.

[1001] The splenocytes of such mice are extracted and fused with a suitable myeloma cell line. Any suitable myeloma cell line may be employed in accordance with the present invention; however, it is preferable to employ the parent myeloma cell line (SP2O), available from the ATCC. After fusion, the resulting hybridoma cells are selectively maintained in HAT medium, and then cloned by limiting dilution as described by Wands et al. (Gastroenterology 80:225-232 (1981)). The hybridoma cells obtained through such a selection are then assayed to identify clones which secrete antibodies capable of binding the polypeptide of the present invention.

[1002] Alternatively, additional antibodies capable of binding to polypeptide of the present invention can be produced in a two-step procedure using anti-idiotypic antibodies. Such a method makes use of the fact that antibodies are themselves antigens, and therefore, it is possible to obtain an antibody which binds to a second antibody. In accordance with this method, protein specific antibodies are used to immunize an animal, preferably a mouse. The splenocytes of such an animal are then used to produce hybridoma cells, and the hybridoma cells are screened to identify clones which produce an antibody whose ability to bind to the polypeptide of the present invention-specific antibody can be blocked by polypeptide of the present invention. Such antibodies comprise anti-idiotypic antibodies to the polypeptide of the present invention-specific antibody and are used to immunize an animal to induce formation of further polypeptide of the present invention-specific antibodies.

[1003] For in vivo use of antibodies in humans, an antibody is “humanized”. Such antibodies can be produced using genetic constructs derived from hybridoma cells producing the monoclonal antibodies described above. Methods for producing chimeric and humanized antibodies are known in the art and are discussed herein. (See, for review, Morrison, Science 229:1202 (1985); Oi et al., BioTechniques 4:214 (1986); Cabilly et al., U.S. Pat. No. 4,816,567; Taniguchi et al., EP 171496; Morrison et al., EP 173494; Neuberger et al., WO 8601533; Robinson et al., International Publication No. WO 8702671; Boulianne et al., Nature 312:643 (1984); Neuberger et al., Nature 314:268 (1985).)

[1004] Isolation of Antibody Fragments Directed Against Polypeptide of the Present Invention from a Library of scFvs

[1005] Naturally occurring V-genes isolated from human PBLs are constructed into a library of antibody fragments which contain reactivities against polypeptide of the present invention to which the donor may or may not have been exposed (see e.g., U.S. Pat. No. 5,885,793 incorporated herein by reference in its entirety).

[1006] Rescue of the Library. A library of scFvs is constructed from the RNA of human PBLs as described in International Publication No. WO 92/01047. To rescue phage displaying antibody fragments, approximately 10⁹ E. coli harboring the phagemid are used to inoculate 50 ml of 2×TY containing 1% glucose and 100 μg/ml of ampicillin (2×TY-AMP-GLU) and grown to an O.D. of 0.8 with shaking. Five ml of this culture is used to inoculate 50 ml of 2×TY-AMP-GLU, 2×108 TU of delta gene 3 helper (M13 delta gene III, see International Publication No. WO 92/01047) are added and the culture incubated at 37° C. for 45 minutes without shaking and then at 37° C. for 45 minutes with shaking. The culture is centrifuged at 4000 r.p.m. for 10 min. and the pellet resuspended in 2 liters of 2×TY containing 100 μg/ml ampicillin and 50 ug/ml kanamycin and grown overnight. Phage are prepared as described in International Application No. WO 92/01047.

[1007] M13 delta gene III is prepared as follows: M13 delta gene III helper phage does not encode gene III protein, hence the phage(mid) displaying antibody fragments have a greater avidity of binding to antigen. Infectious M13 delta gene III particles are made by growing the helper phage in cells harboring a pUC19 derivative supplying the wild type gene III protein during phage morphogenesis. The culture is incubated for 1 hour at 37° C. without shaking and then for a further hour at 37° C. with shaking. Cells are spun down (IEC-Centra 8,400 r.p.m. for 10 min), resuspended in 300 ml 2×TY broth containing 100 μg ampicillin/ml and 25 μg kanamycin/ml (2×TY-AMP-KAN) and grown overnight, shaking at 37° C. Phage particles are purified and concentrated from the culture medium by two PEG-precipitations (Sambrook et al., 1990), resuspended in 2 ml PBS and passed through a 0.45 μm filter (Minisart NML; Sartorius) to give a final concentration of approximately 10¹³ transducing units/ml (ampicillin-resistant clones).

[1008] Panning of the Library. Immunotubes (Nunc) are coated overnight in PBS with 4 ml of either 100 μg/ml or 10 μg/ml of a polypeptide of the present invention. Tubes are blocked with 2% Marvel-PBS for 2 hours at 37° C. and then washed 3 times in PBS. Approximately 10¹³ TU of phage is applied to the tube and incubated for 30 minutes at room temperature tumbling on an over and under turntable and then left to stand for another 1.5 hours. Tubes are washed 10 times with PBS 0.1% Tween-20 and 10 times with PBS. Phage are eluted by adding 1 ml of 100 mM triethylamine and rotating 15 minutes on an under and over turntable after which the solution is immediately neutralized with 0.5 ml of 1.0M Tris-HCl, pH 7.4. Phage are then used to infect 10 ml of mid-log E. coli TG1 by incubating eluted phage with bacteria for 30 minutes at 37° C. The E. coli are then plated on TYE plates containing 1% glucose and 100 μg/ml ampicillin. The resulting bacterial library is then rescued with delta gene 3 helper phage as described above to prepare phage for a subsequent round of selection. This process is then repeated for a total of 4 rounds of affinity purification with tube-washing increased to 20 times with PBS, 0.1% Tween-20 and 20 times with PBS for rounds 3 and 4.

[1009] Characterization of Binders. Eluted phage from the 3rd and 4th rounds of selection are used to infect E. coli HB 2151 and soluble scFv is produced (Marks, et al., 1991) from single colonies for assay. ELISAs are performed with microtitre plates coated with 10 pg/ml of the polypeptide of the present invention in 50 mM bicarbonate pH 9.6. Clones positive in ELISA are further characterized by PCR fingerprinting (see, e.g., International Application No. WO 92/01047) and then by sequencing. These ELISA positive clones may also be further characterized by techniques known in the art, such as, for example, epitope mapping, binding affinity, receptor signal transduction, ability to block or competitively inhibit antibody/antigen binding, and competitive agonistic or antagonistic activity.

### Example 11

[1010] Method of Determining Alterations in a Gene Corresponding to a Polynucleotide

[1011] RNA isolated from entire families or individual patients presenting with a phenotype of interest (such as a disease) is isolated. cDNA is then generated from these RNA samples using protocols known in the art. (See, Sambrook.) The cDNA is then used as a template for PCR, employing primers surrounding regions of interest in SEQ ID NO:X; and/or the nucleotide sequence of the cDNA contained in Clone ID NO:Z. Suggested PCR conditions consist of 35 cycles at 95 degrees C. for 30 seconds; 60-120 seconds at 52-58 degrees C.; and 60-120 seconds at 70 degrees C., using buffer solutions described in Sidransky et al., Science 252:706 (1991).

[1012] PCR products are then sequenced using primers labeled at their 5′ end with T4 polynucleotide kinase, employing SequiTherm Polymerase (Epicentre Technologies). The intron-exon boundaries of selected exons is also determined and genomic PCR products analyzed to confirm the results. PCR products harboring suspected mutations are then cloned and sequenced to validate the results of the direct sequencing.

[1013] PCR products are cloned into T-tailed vectors as described in Holton et al., Nucleic Acids Research, 19:1156 (1991) and sequenced with T7 polymerase (United States Biochemical). Affected individuals are identified by mutations not present in unaffected individuals.

[1014] Genomic rearrangements are also observed as a method of determining alterations in a gene corresponding to a polynucleotide. Genomic clones isolated according to Example 2 are nick-translated with digoxigenindeoxy-uridine 5′-triphosphate (Boehringer Manheim), and FISH performed as described in Johnson et al., Methods Cell Biol. 35:73-99 (1991). Hybridization with the labeled probe is carried out using a vast excess of human cot-1 DNA for specific hybridization to the corresponding genomic locus.

[1015] Chromosomes are counterstained with 4,6-diamino-2-phenylidole and propidium iodide, producing a combination of C- and R-bands. Aligned images for precise mapping are obtained using a triple-band filter set (Chroma Technology, Brattleboro, Vt.) in combination with a cooled charge-coupled device camera (Photometrics, Tucson, Ariz.) and variable excitation wavelength filters. (Johnson et al., Genet. Anal. Tech. Appl., 8:75 (1991).) Image collection, analysis and chromosomal fractional length measurements are performed using the ISee Graphical Program System. (Inovision Corporation, Durham, N.C.) Chromosome alterations of the genomic region hybridized by the probe are identified as insertions, deletions, and translocations. These alterations are used as a diagnostic marker for an associated disease.

### Example 12

[1016] Method of Detecting Abnormal Levels of a Polypeptide in a Biological Sample

[1017] A polypeptide of the present invention can be detected in a biological sample, and if an increased or decreased level of the polypeptide is detected, this polypeptide is a marker for a particular phenotype. Methods of detection are numerous, and thus, it is understood that one skilled in the art can modify the following assay to fit their particular needs.

[1018] For example, antibody-sandwich ELISAs are used to detect polypeptides in a sample, preferably a biological sample. Wells of a microtiter plate are coated with specific antibodies, at a final concentration of 0.2 to 10 ug/ml. The antibodies are either monoclonal or polyclonal and are produced by the method described in Example 10. The wells are blocked so that non-specific binding of the polypeptide to the well is reduced.

[1019] The coated wells are then incubated for >2 hours at RT with a sample containing the polypeptide. Preferably, serial dilutions of the sample should be used to validate results. The plates are then washed three times with deionized or distilled water to remove unbound polypeptide.

[1020] Next, 50 ul of specific antibody-alkaline phosphatase conjugate, at a concentration of 25-400 ng, is added and incubated for 2 hours at room temperature. The plates are again washed three times with deionized or distilled water to remove unbound conjugate.

[1021] Add 75 ul of 4-methylumbelliferyl phosphate (MUP) or p-nitrophenyl phosphate (NPP) substrate solution to each well and incubate 1 hour at room temperature. Measure the reaction by a microtiter plate reader. Prepare a standard curve, using serial dilutions of a control sample, and plot polypeptide concentration on the X-axis (log scale) and fluorescence or absorbance of the Y-axis (linear scale). Interpolate the concentration of the polypeptide in the sample using the standard curve.

### Example 13

[1022] Formulation

[1023] The invention also provides methods of treatment and/or prevention of diseases or disorders (such as, for example, any one or more of the diseases or disorders disclosed herein) by administration to a subject of an effective amount of a Therapeutic. By therapeutic is meant polynucleotides or polypeptides of the invention (including fragments and variants), agonists or antagonists thereof, and/or antibodies thereto, in combination with a pharmaceutically acceptable carrier type (e.g., a sterile carrier).

[1024] The Therapeutic will be formulated and dosed in a fashion consistent with good medical practice, taking into account the clinical condition of the individual patient (especially the side effects of treatment with the Therapeutic alone), the site of delivery, the method of administration, the scheduling of administration, and other factors known to practitioners. The “effective amount” for purposes herein is thus determined by such considerations.

[1025] As a general proposition, the total pharmaceutically effective amount of the Therapeutic administered parenterally per dose will be in the range of about 1 ug/kg/day to 10 mg/kg/day of patient body weight, although, as noted above, this will be subject to therapeutic discretion. More preferably, this dose is at least 0.01 mg/kg/day, and most preferably for humans between about 0.01 and 1 mg/kg/day for the hormone. If given continuously, the Therapeutic is typically administered at a dose rate of about 1 ug/kg/hour to about 50 ug/kg/hour, either by 1-4 injections per day or by continuous subcutaneous infusions, for example, using a mini-pump. An intravenous bag solution may also be employed. The length of treatment needed to observe changes and the interval following treatment for responses to occur appears to vary depending on the desired effect.

[1026] Therapeutics can be are administered orally, rectally, parenterally, intracistemally, intravaginally, intraperitoneally, topically (as by powders, ointments, gels, drops or transdermal patch), bucally, or as an oral or nasal spray. “Pharmaceutically acceptable carrier” refers to a non-toxic solid, semisolid or liquid filler, diluent, encapsulating material or formulation auxiliary of any. The term “parenteral” as used herein refers to modes of administration which include intravenous, intramuscular, intraperitoneal, intrasternal, subcutaneous and intraarticular injection and infusion.

[1027] Therapeutics of the invention are also suitably administered by sustained-release systems. Suitable examples of sustained-release Therapeutics are administered orally, rectally, parenterally, intracistemally, intravaginally, intraperitoneally, topically (as by powders, ointments, gels, drops or transdermal patch), bucally, or as an oral or nasal spray. “Pharmaceutically acceptable carrier” refers to a non-toxic solid, semisolid or liquid filler, diluent, encapsulating material or formulation auxiliary of any type. The term “parenteral” as used herein refers to modes of administration which include intravenous, intramuscular, intraperitoneal, intrasternal, subcutaneous and intraarticular injection and infusion.

[1028] Therapeutics of the invention are also suitably administered by sustained-release systems. Suitable examples of sustained-release Therapeutics include suitable polymeric materials (such as, for example, semi-permeable polymer matrices in the form of shaped articles, e.g., films, or mirocapsules), suitable hydrophobic materials (for example as an emulsion in an acceptable oil) or ion exchange resins, and sparingly soluble derivatives (such as, for example, a sparingly soluble salt).

[1029] Sustained-release matrices include polylactides (U.S. Pat. No. 3,773,919, EP 58,481), copolymers of L-glutamic acid and gamma-ethyl-L-glutamate (Sidman et al., Biopolymers 22:547-556 (1983)), poly(2-hydroxyethyl methacrylate) (Langer et al., J. Biomed. Mater. Res. 15:167-277 (1981), and Langer, Chem. Tech. 12:98-105 (1982)), ethylene vinyl acetate (Langer et al., Id.) or poly-D-(−)-3-hydroxybutyric acid (EP 133,988).

[1030] Sustained-release Therapeutics also include liposomally entrapped Therapeutics of the invention (see generally, Langer, Science 249:1527-1533 (1990); Treat et al., in Liposomes in the Therapy of Infectious Disease and Cancer, Lopez-Berestein and Fidler (eds.), Liss, N.Y., pp. 317-327 and 353-365 (1989)). Liposomes containing the Therapeutic are prepared by methods known per se: DE Pat. No. 3,218,121; Epstein et al., Proc. Natl. Acad. Sci. (USA) 82:3688-3692 (1985); Hwang et al., Proc. Natl. Acad. Sci.(USA) 77:4030-4034 (1980); EP 52,322; EP 36,676; EP 88,046; EP 143,949; EP 142,641; Japanese Pat. Appl. 83-118008; U.S. Pat. Nos. 4,485,045 and 4,544,545; and EP 102,324. Ordinarily, the liposomes are of the small (about 200-800 Angstroms) unilamellar type in which the lipid content is greater than about 30 mol. percent cholesterol, the selected proportion being adjusted for the optimal Therapeutic.

[1031] In yet an additional embodiment, the Therapeutics of the invention are delivered by way of a pump (see Langer, supra; Sefton, CRC Crit. Ref. Biomed. Eng. 14:201 (1987); Buchwald et al., Surgery 88:507 (1980); Saudek et al., N. Engl. J. Med. 321:574 (1989)).

[1032] Other controlled release systems are discussed in the review by Langer (Science 249:1527-1533 (1990)).

[1033] For parenteral administration, in one embodiment, the Therapeutic is formulated generally by mixing it at the desired degree of purity, in a unit dosage injectable form (solution, suspension, or emulsion), with a pharmaceutically acceptable carrier, i.e., one that is non-toxic to recipients at the dosages and concentrations employed and is compatible with other ingredients of the formulation. For example, the formulation preferably does not include oxidizing agents and other compounds that are known to be deleterious to the Therapeutic.

[1034] Generally, the formulations are prepared by contacting the Therapeutic uniformly and intimately with liquid carriers or finely divided solid carriers or both. Then, if necessary, the product is shaped into the desired formulation. Preferably the carrier is a parenteral carrier, more preferably a solution that is isotonic with the blood of the recipient. Examples of such carrier vehicles include water, saline, Ringer's solution, and dextrose solution. Non-aqueous vehicles such as fixed oils and ethyl oleate are also useful herein, as well as liposomes.

[1035] The carrier suitably contains minor amounts of additives such as substances that enhance isotonicity and chemical stability. Such materials are non-toxic to recipients at the dosages and concentrations employed, and include buffers such as phosphate, citrate, succinate, acetic acid, and other organic acids or their salts; antioxidants such as ascorbic acid; low molecular weight (less than about ten residues) polypeptides, e.g., polyarginine or tripeptides; proteins, such as serum albumin, gelatin, or immunoglobulins; hydrophilic polymers such as polyvinylpyrrolidone; amino acids, such as glycine, glutamic acid, aspartic acid, or arginine; monosaccharides, disaccharides, and other carbohydrates including cellulose or its derivatives, glucose, manose, or dextrins; chelating agents such as EDTA; sugar alcohols such as mannitol or sorbitol; counterions such as sodium; and/or nonionic surfactants such as polysorbates, poloxamers, or PEG.

[1036] The Therapeutic is typically formulated in such vehicles at a concentration of about 0.1 mg/ml to 100 mg/ml, preferably 1-10 mg/ml, at a pH of about 3 to 8. It will be understood that the use of certain of the foregoing excipients, carriers, or stabilizers will result in the formation of polypeptide salts.

[1037] Any pharmaceutical used for therapeutic administration can be sterile. Sterility is readily accomplished by filtration through sterile filtration membranes (e.g., 0.2 micron membranes). Therapeutics generally are placed into a container having a sterile access port, for example, an intravenous solution bag or vial having a stopper pierceable by a hypodermic injection needle.

[1038] Therapeutics ordinarily will be stored in unit or multi-dose containers, for example, sealed ampoules or vials, as an aqueous solution or as a lyophilized formulation for reconstitution. As an example of a lyophilized formulation, 10-ml vials are filled with 5 ml of sterile-filtered 1% (w/v) aqueous Therapeutic solution, and the resulting mixture is lyophilized. The infusion solution is prepared by reconstituting the lyophilized Therapeutic using bacteriostatic Water-for-Injection.

[1039] The invention also provides a pharmaceutical pack or kit comprising one or more containers filled with one or more of the ingredients of the Therapeutics of the invention. Associated with such container(s) can be a notice in the form prescribed by a governmental agency regulating the manufacture, use or sale of pharmaceuticals or biological products, which notice reflects approval by the agency of manufacture, use or sale for human administration. In addition, the Therapeutics may be employed in conjunction with other therapeutic compounds.

[1040] The Therapeutics of the invention may be administered alone or in combination with adjuvants. Adjuvants that may be administered with the Therapeutics of the invention include, but are not limited to, alum, alum plus deoxycholate (ImmunoAg), MTP-PE (Biocine Corp.), QS21 (Genentech, Inc.), BCG (e.g., THERACYS®), MPL and nonviable prepartions of Corynebacterium parvum. In a specific embodiment, Therapeutics of the invention are administered in combination with alum. In another specific embodiment, Therapeutics of the invention are administered in combination with QS-21. Further adjuvants that may be administered with the Therapeutics of the invention include, but are not limited to, Monophosphoryl lipid immunomodulator, AdjuVax 100a, QS-21, QS-18, CRL1005, Aluminum salts, MF-59, and Virosomal adjuvant technology. Vaccines that may be administered with the Therapeutics of the invention include, but are not limited to, vaccines directed toward protection against MMR (measles, mumps, rubella), polio, varicella, tetanus/diptheria, hepatitis A, hepatitis B, haemophilus influenzae B, whooping cough, pneumonia, influenza, Lyme's Disease, rotavirus, cholera, yellow fever, Japanese encephalitis, poliomyelitis, rabies, typhoid fever, and pertussis. Combinations may be administered either concomitantly, e.g., as an admixture, separately but simultaneously or concurrently; or sequentially. This includes presentations in which the combined agents are administered together as a therapeutic mixture, and also procedures in which the combined agents are administered separately but simultaneously, e.g., as through separate intravenous lines into the same individual. Administration “in combination” further includes the separate administration of one of the compounds or agents given first, followed by the second.

[1041] The Therapeutics of the invention may be administered alone or in combination with other therapeutic agents. Therapeutic agents that may be administered in combination with the Therapeutics of the invention, include but not limited to, chemotherapeutic agents, antibiotics, steroidal and non-steroidal anti-inflammatories, conventional immunotherapeutic agents, and/or therapeutic treatments described below. Combinations may be administered either concomitantly, e.g., as an admixture, separately but simultaneously or concurrently; or sequentially. This includes presentations in which the combined agents are administered together as a therapeutic mixture, and also procedures in which the combined agents are administered separately but simultaneously, e.g., as through separate intravenous lines into the same individual. Administration “in combination” further includes the separate administration of one of the compounds or agents given first, followed by the second.

[1042] In certain embodiments, Therapeutics of the invention are administered in combination with antiretroviral agents, nucleoside/nucleotide reverse transcriptase inhibitors (NRTIs), non-nucleoside reverse transcriptase inhibitors (NNRTIs), and/or protease inhibitors (PIs). NRTIs that may be administered in combination with the Therapeutics of the invention, include, but are not limited to, RETROVIR™ (zidovudine/AZT), VIDEX™ (didanosine/ddI), HIVID™ (zalcitabine/ddC), ZERIT™ (stavudine/d4T), EPIVIR™ (lamivudine/3TC), and COMBIVIR™ (zidovudine/lamivudine). NNRTIs that may be administered in combination with the Therapeutics of the invention, include, but are not limited to, VIRAMUNE™ (nevirapine), RESCRIPTOR™ (delavirdine), and SUSTIVA™ (efavirenz). Protease inhibitors that may be administered in combination with the Therapeutics of the invention, include, but are not limited to, CRIXIVAN™ (indinavir), NORVIR™ (ritonavir), INVIRASE™ (saquinavir), and VIRACEPT™ (nelfinavir). In a specific embodiment, antiretroviral agents, nucleoside reverse transcriptase inhibitors, non-nucleoside reverse transcriptase inhibitors, and/or protease inhibitors may be used in any combination with Therapeutics of the invention to treat AIDS and/or to prevent or treat HIV infection.

[1043] Additional NRTIs include LODENOSINE™ (F-ddA; an acid-stable adenosine NRTI; Triangle/Abbott; COVIRACIL™ (emtricitabine/FTC; structurally related to lamivudine (3TC) but with 3- to 10-fold greater activity in vitro; Triangle/Abbott); dOTC (BCH-10652, also structurally related to lamivudine but retains activity against a substantial proportion of lamivudine-resistant isolates; Biochem Pharma); Adefovir (refused approval for anti-HIV therapy by FDA; Gilead Sciences); PREVEON® (Adefovir Dipivoxil, the active prodrug of adefovir; its active form is PMEA-pp); TENOFOVIR™ (bis-POC PMPA, a PMPA prodrug; Gilead); DAPD/DXG (active metabolite of DAPD; Triangle/Abbott); D-D4FC (related to 3TC, with activity against AZT/3TC-resistant virus); GW420867X (Glaxo Wellcome); ZIAGEN™ (abacavir/159U89; Glaxo Wellcome Inc.); CS-87 (3′azido-2′,3′-dideoxyuridine; WO 99/66936); and S-acyl-2-thioethyl (SATE)-bearing prodrug forms of β-L-FD4C and β-L-FddC (WO 98/17281).

[1044] Additional NNRTIs include COACTINON™ (Emivirine/MKC-442, potent NNRTI of the HEPT class; Triangle/Abbott); CAPRAVIRINE™ (AG-1549/S-1153, a next generation NNRTI with activity against viruses containing the K103N mutation; Agouron); PNU-142721 (has 20- to 50-fold greater activity than its predecessor delavirdine and is active against K103N mutants; Pharmacia & Upjohn); DPC-961 and DPC-963 (second-generation derivatives of efavirenz, designed to be active against viruses with the K103N mutation; DuPont); GW-420867X (has 25-fold greater activity than HBY097 and is active against K103N mutants; Glaxo Wellcome); CALANOLIDE A (naturally occurring agent from the latex tree; active against viruses containing either or both the Y181C and K103N mutations); and Propolis (WO 99/49830).

[1045] Additional protease inhibitors include LOPINAVIR™ (ABT378/r; Abbott Laboratories); BMS-232632 (an azapeptide; Bristol-Myres Squibb); TIPRANAVIR™ (PNU-140690, a non-peptic dihydropyrone; Pharmacia & Upjohn); PD-178390 (a nonpeptidic dihydropyrone; Parke-Davis); BMS 232632 (an azapeptide; Bristol-Myers Squibb); L-756,423 (an indinavir analog; Merck); DMP-450 (a cyclic urea compound; Avid & DuPont); AG-1776 (a peptidomimetic with in vitro activity against protease inhibitor-resistant viruses; Agouron); VX-175/GW-433908 (phosphate prodrug of amprenavir; Vertex & Glaxo Welcome); CGP61755 (Ciba); and AGENERASE™ (amprenavir; Glaxo Wellcome Inc.).

[1046] Additional antiretroviral agents include fusion inhibitors/gp41 binders. Fusion inhibitors/gp41 binders include T-20 (a peptide from residues 643-678 of the HIV gp41 transmembrane protein ectodomain which binds to gp41 in its resting state and prevents transformation to the fusogenic state; Trimeris) and T-1249 (a second-generation fusion inhibitor; Trimeris).

[1047] Additional antiretroviral agents include fusion inhibitors/chemokine receptor antagonists. Fusion inhibitors/chemokine receptor antagonists include CXCR4 antagonists such as AMD 3100 (a bicyclam), SDF-1 and its analogs, and ALX40-4C (a cationic peptide), T22 (an 18 amino acid peptide; Trimeris) and the T22 analogs T134 and T140; CCR5 antagonists such as RANTES (9-68), AOP-RANTES, NNY-RANTES, and TAK-779; and CCR5/CXCR4 antagonists such as NSC 651016 (a distamycin analog). Also included are CCR2B, CCR3, and CCR6 antagonists. Chemokine recpetor agonists such as RANTES, SDF-1, MIP-160 , MIP-1β, etc., may also inhibit fusion.

[1048] Additional antiretroviral agents include integrase inhibitors. Integrase inhibitors include dicaffeoylquinic (DFQA) acids; L-chicoric acid (a dicaffeoyltartaric (DCTA) acid); quinalizarin (QLC) and related anthraquinones; ZINTEVIR™ (AR 177, an oligonucleotide that probably acts at cell surface rather than being a true integrase inhibitor; Arondex); and naphthols such as those disclosed in WO 98/50347.

[1049] Additional antiretroviral agents include hydroxyurea-like compunds such as BCX-34 (a purine nucleoside phosphorylase inhibitor; Biocryst); ribonucleotide reductase inhibitors such as DIDOX™ (Molecules for Health); inosine monophosphate dehydrogenase (IMPDH) inhibitors sucha as VX-497 (Vertex); and myvopholic acids such as CellCept (mycophenolate mofetil; Roche).

[1050] Additional antiretroviral agents include inhibitors of viral integrase, inhibitors of viral genome nuclear translocation such as arylene bis(methylketone) compounds; inhibitors of HIV entry such as AOP-RANTES, NNY-RANTES, RANTES-IgG fusion protein, soluble complexes of RANTES and glycosaminoglycans (GAG), and AMD-3100; nucleocapsid zinc finger inhibitors such as dithiane compounds; targets of HIV Tat and Rev; and pharmacoenhancers such as ABT-378.

[1051] Other antiretroviral therapies and adjunct therapies include cytokines and lymphokines such as MIP-1α, MIP-1β, SDF-1α, IL-2, PROLEUKIN™ (aldesleukin/L2-7001; Chiron), IL-4, IL-10, IL-12, and IL-13; interferons such as IFN-α2a; antagonists of TNFs, NFκB, GM-CSF, M-CSF, and IL-10; agents that modulate immune activation such as cyclosporin and prednisone; vaccines such as Remune™ (HIV Immunogen), APL 400-003 (Apollon), recombinant gp120 and fragments, bivalent (B/E) recombinant envelope glycoprotein, rgp120CM235, MN rgp120, SF-2 rgp120, gp120/soluble CD4 complex, Delta JR-FL protein, branched synthetic peptide derived from discontinuous gp120 C3/C4 domain, fusion-competent immunogens, and Gag, Pol, Nef, and Tat vaccines; gene-based therapies such as genetic suppressor elements (GSEs; WO 98/54366), and intrakines (genetically modified CC chemokines targetted to the ER to block surface expression of newly synthesized CCR5 (Yang et al., PNAS 94:11567-72 (1997); Chen et al., Nat. Med. 3:1110-16 (1997)); antibodies such as the anti-CXCR4 antibody 12G5, the anti-CCR5 antibodies 2D7, 5C7, PA8, PA9, PA10, PA11, PA12, and PA14, the anti-CD4 antibodies Q4120 and RPA-T4, the anti-CCR3 antibody 7B11, the anti-gp120 antibodies 17b, 48d, 447-52D, 257-D, 268-D and 50.1, anti-Tat antibodies, anti-TNF-α antibodies, and monoclonal antibody 33A; aryl hydrocarbon (AH) receptor agonists and antagonists such as TCDD, 3,3′,4,4′,5-pentachlorobiphenyl, 3,3′,4,4′-tetrachlorobiphenyl, and α-naphthoflavone (WO 98/30213); and antioxidants such as γ-L-glutamyl-L-cysteine ethyl ester (γ-GCE; WO 99/56764).

[1052] In a further embodiment, the Therapeutics of the invention are administered in combination with an antiviral agent. Antiviral agents that may be administered with the Therapeutics of the invention include, but are not limited to, acyclovir, ribavirin, amantadine, and remantidine.

[1053] In other embodiments, Therapeutics of the invention may be administered in combination with anti-opportunistic infection agents. Anti-opportunistic agents that may be administered in combination with the Therapeutics of the invention, include, but are not limited to, TRIMETHOPRIM-SULFAMETHOXAZOLE™, DAPSONE™, PENTAMIDINE™, ATOVAQUONE™, ISONIAZID™, RIFAMPIN™, PYRAZINAMIDE™, ETHAMBUTOL™, RIFABUTIN™, CLARITHROMYCIN™, AZITHROMYCIN™, GANCICLOVIR™, FOSCARNET™, CIDOFOVIR™, FLUCONAZOLE™, ITRACONAZOLE™, KETOCONAZOLE™, ACYCLOVIR™, FAMCICOLVIR™, PYRIMETHAMINE™, LEUCOVORIN™, NEUPOGEN™ (filgrastim/G-CSF), and LEUKINE™ (sargramostim/GM-CSF). In a specific embodiment, Therapeutics of the invention are used in any combination with TRIMETHOPRIM-SULFAMETHOXAZOLE™, DAPSONE™, PENTAMIDINE™, and/or ATOVAQUONE™ to prophylactically treat or prevent an opportunistic Pneumocystis carinii pneumonia infection. In another specific embodiment, Therapeutics of the invention are used in any combination with ISONIAZID™, RIFAMPIN™, PYRAZINAMIDE™, and/or ETHAMBUTOL™ to prophylactically treat or prevent an opportunistic Mycobacterium avium complex infection. In another specific embodiment, Therapeutics of the invention are used in any combination with RIFABUTIN™, CLARITHROMYCIN™, and/or AZITHROMYCIN™ to prophylactically treat or prevent an opportunistic Mycobacterium tuberculosis infection. In another specific embodiment, Therapeutics of the invention are used in any combination with GANCICLOVIR™, FOSCARNET™, and/or CIDOFOVIR™ to prophylactically treat or prevent an opportunistic cytomegalovirus infection. In another specific embodiment, Therapeutics of the invention are used in any combination with FLUCONAZOLE™, ITRACONAZOLE™, and/or KETOCONAZOLE™ to prophylactically treat or prevent an opportunistic fungal infection. In another specific embodiment, Therapeutics of the invention are used in any combination with ACYCLOVIR™ and/or FAMCICOLVIR™ to prophylactically treat or prevent an opportunistic herpes simplex virus type I and/or type II infection. In another specific embodiment, Therapeutics of the invention are used in any combination with PYRIMETHAMINE™ and/or LEUCOVORIN™ to prophylactically treat or prevent an opportunistic Toxoplasma gondii infection. In another specific embodiment, Therapeutics of the invention are used in any combination with LEUCOVORIN™ and/or NEUPOGEN™ to prophylactically treat or prevent an opportunistic bacterial infection.

[1054] In a further embodiment, the Therapeutics of the invention are administered in combination with an antibiotic agent. Antibiotic agents that may be administered with the Therapeutics of the invention include, but are not limited to, amoxicillin, beta-lactamases, aminoglycosides, beta-lactam (glycopeptide), beta-lactamases, Clindamycin, chloramphenicol, cephalosporins, ciprofloxacin, ciprofloxacin, erythromycin, fluoroquinolones, macrolides, metronidazole, penicillins, quinolones, rapamycin, rifampin, streptomycin, sulfonamide, tetracyclines, trimethoprim, trimethoprim-sulfamthoxazole, and vancomycin.

[1055] In other embodiments, Therapeutics of the invention are administered in combination with immunosuppressive agents. Immunosuppressive agents that may be administered in combination with the Therapeutics of the invention include, but are not limited to, steroids, cyclosporine, cyclosporine analogs, cyclophosphamide methylprednisone, prednisone, azathioprine, FK-506, 15-deoxyspergualin, and other immunosuppressive agents that act by suppressing the function of responding T cells. Other immunosuppressive agents that may be administered in combination with the Therapeutics of the invention include, but are not limited to, prednisolone, methotrexate, thalidomide, methoxsalen, rapamycin, leflunomide, mizoribine (BREDININ™), brequinar, deoxyspergualin, and azaspirane (SKF 105685), ORTHOCLONE OKT® 3 (muromonab-CD3), SANDIMMUNE™, NEORAL™, SANGDYA™ (cyclosporine), PROGRAFT® (FK506, tacrolimus), CELLCEPT® (mycophenolate motefil, of which the active metabolite is mycophenolic acid), IMURAN™ (azathioprine), glucocorticosteroids, adrenocortical steroids such as DELTASONE™ (prednisone) and HYDELTRASOL™ (prednisolone), FOLEX™ and MEXATE™ (methotrxate), OXSORALEN-ULTRA™ (methoxsalen) and RAPAMUNE™ (sirolimus). In a specific embodiment, immunosuppressants may be used to prevent rejection of organ or bone marrow transplantation.

[1056] In an additional embodiment, Therapeutics of the invention are administered alone or in combination with one or more intravenous immune globulin preparations. Intravenous immune globulin preparations that may be administered with the Therapeutics of the invention include, but not limited to, GAMMAR™, IVEEGAM™, SANDOGLOBULIN™, GAMMAGARD S/D™, ATGAM™ (antithymocyte glubulin), and GAMIMUNE™. In a specific embodiment, Therapeutics of the invention are administered in combination with intravenous immune globulin preparations in transplantation therapy (e.g., bone marrow transplant).

[1057] In certain embodiments, the Therapeutics of the invention are administered alone or in combination with an anti-inflammatory agent. Anti-inflammatory agents that may be administered with the Therapeutics of the invention include, but are not limited to, corticosteroids (e.g. betamethasone, budesonide, cortisone, dexamethasone, hydrocortisone, methylprednisolone, prednisolone, prednisone, and triamcinolone), nonsteroidal anti-inflammatory drugs (e.g., diclofenac, diflunisal, etodolac, fenoprofen, floctafenine, flurbiprofen, ibuprofen, indomethacin, ketoprofen, meclofenamate, mefenamic acid, meloxicam, nabumetone, naproxen, oxaprozin, phenylbutazone, piroxicam, sulindac, tenoxicam, tiaprofenic acid, and tolmetin.), as well as antihistamines, aminoarylcarboxylic acid derivatives, arylacetic acid derivatives, arylbutyric acid derivatives, arylcarboxylic acids, arylpropionic acid derivatives, pyrazoles, pyrazolones, salicylic acid derivatives, thiazinecarboxamides, e-acetamidocaproic acid, S-adenosylmethionine, 3-amino-4-hydroxybutyric acid, amixetrine, bendazac, benzydamine, bucolome, difenpiramide, ditazol, emorfazone, guaiazulene, nabumetone, nimesulide, orgotein, oxaceprol, paranyline, perisoxal, pifoxime, proquazone, proxazole, and tenidap.

[1058] In an additional embodiment, the compositions of the invention are administered alone or in combination with an anti-angiogenic agent. Anti-angiogenic agents that may be administered with the compositions of the invention include, but are not limited to, Angiostatin (Entremed, Rockville, Md.), Troponin-1 (Boston Life Sciences, Boston, Mass.), anti-Invasive Factor, retinoic acid and derivatives thereof, paclitaxel (Taxol), Suramin, Tissue Inhibitor of Metalloproteinase-1, Tissue Inhibitor of Metalloproteinase-2, VEGI, Plasminogen Activator Inhibitor-1, Plasminogen Activator Inhibitor-2, and various forms of the lighter “d group” transition metals.

[1059] Lighter “d group” transition metals include, for example, vanadium, molybdenum, tungsten, titanium, niobium, and tantalum species. Such transition metal species may form transition metal complexes. Suitable complexes of the above-mentioned transition metal species include oxo transition metal complexes.

[1060] Representative examples of vanadium complexes include oxo vanadium complexes such as vanadate and vanadyl complexes. Suitable vanadate complexes include metavanadate and orthovanadate complexes such as, for example, ammonium metavanadate, sodium metavanadate, and sodium orthovanadate. Suitable vanadyl complexes include, for example, vanadyl acetylacetonate and vanadyl sulfate including vanadyl sulfate hydrates such as vanadyl sulfate mono- and trihydrates.

[1061] Representative examples of tungsten and molybdenum complexes also include oxo complexes. Suitable oxo tungsten complexes include tungstate and tungsten oxide complexes. Suitable tungstate complexes include ammonium tungstate, calcium tungstate, sodium tungstate dihydrate, and tungstic acid. Suitable tungsten oxides include tungsten (IV) oxide and tungsten (VI) oxide. Suitable oxo molybdenum complexes include molybdate, molybdenum oxide, and molybdenyl complexes. Suitable molybdate complexes include ammonium molybdate and its hydrates, sodium molybdate and its hydrates, and potassium molybdate and its hydrates. Suitable molybdenum oxides include molybdenum (VI) oxide, molybdenum (VI) oxide, and molybdic acid. Suitable molybdenyl complexes include, for example, molybdenyl acetylacetonate. Other suitable tungsten and molybdenum complexes include hydroxo derivatives derived from, for example, glycerol, tartaric acid, and sugars.

[1062] A wide variety of other anti-angiogenic factors may also be utilized within the context of the present invention. Representative examples include, but are not limited to, platelet factor 4; protamine sulphate; sulphated chitin derivatives (prepared from queen crab shells), (Murata et al., Cancer Res. 51:22-26, (1991)); Sulphated Polysaccharide Peptidoglycan Complex (SP-PG) (the function of this compound may be enhanced by the presence of steroids such as estrogen, and tamoxifen citrate); Staurosporine; modulators of matrix metabolism, including for example, proline analogs, cishydroxyproline, d,L-3,4-dehydroproline, Thiaproline, alpha,alpha-dipyridyl, aminopropionitrile fumarate; 4-propyl-5-(4-pyridinyl)-2(3H)-oxazolone; Methotrexate; Mitoxantrone; Heparin; Interferons; 2 Macroglobulin-serum; ChIMP-3 (Pavloff et al., J. Bio. Chem. 267:17321-17326, (1992)); Chymostatin (Tomkinson et al., Biochem J. 286:475-480, (1992)); Cyclodextrin Tetradecasulfate; Eponemycin; Camptothecin; Fumagillin (Ingber et al., Nature 348:555-557, (1990)); Gold Sodium Thiomalate (“GST”; Matsubara and Ziff, J. Clin. Invest. 79:1440-1446, (1987)); anticollagenase-serum; alpha2-antiplasmin (Holmes et al., J. Biol. Chem. 262(4):1659-1664, (1987)); Bisantrene (National Cancer Institute); Lobenzarit disodium (N-(2)-carboxyphenyl-4-chloroanthronilic acid disodium or “CCA”; (Takeuchi et al., Agents Actions 36:312-316, (1992)); and metalloproteinase inhibitors such as BB94.

[1063] Additional anti-angiogenic factors that may also be utilized within the context of the present invention include Thalidomide, (Celgene, Warren, N.J.); Angiostatic steroid; AGM-1470 (H. Brem and J. Folkman J Pediatr. Surg. 28:445-51 (1993)); an integrin alpha v beta 3 antagonist (C. Storgard et al., J Clin. Invest. 103:47-54 (1999)); carboxynaminolmidazole; Carboxyamidotriazole (CAI) (National Cancer Institute, Bethesda, Md.); Conbretastatin A-4 (CA4P) (OXiGENE, Boston, Mass.); Squalamine (Magainin Pharmaceuticals, Plymouth Meeting, Pa.); TNP-470, (Tap Pharmaceuticals, Deerfield, Ill.); ZD-0101 AstraZeneca (London, UK); APRA (CT2584); Benefin, Byrostatin-1 (SC339555); CGP-41251 (PKC 412); CM101; Dexrazoxane (ICRF187); DMXAA; Endostatin; Flavopridiol; Genestein; GTE; Imm Ther; Iressa (ZD1839); Octreotide (Somatostatin); Panretin; Penacillamine; Photopoint; PI-88; Prinomastat (AG-3340) Purlytin; Suradista (FCE26644); Tamoxifen (Nolvadex); Tazarotene; Tetrathiomolybdate; Xeloda (Capecitabine); and 5-Fluorouracil.

[1064] Anti-angiogenic agents that may be administed in combination with the compounds of the invention may work through a variety of mechanisms including, but not limited to, inhibiting proteolysis of the extracellular matrix, blocking the function of endothelial cell-extracellular matrix adhesion molecules, by antagonizing the function of angiogenesis inducers such as growth factors, and inhibiting integrin receptors expressed on proliferating endothelial cells. Examples of anti-angiogenic inhibitors that interfere with extracellular matrix proteolysis and which may be administered in combination with the compositons of the invention include, but are not lmited to, AG-3340 (Agouron, La. Jolla, Calif.), BAY-12-9566 (Bayer, West Haven, Conn.), BMS-275291 (Bristol Myers Squibb, Princeton, N.J.), CGS-27032A (Novartis, East Hanover, N.J.), Marimastat (British Biotech, Oxford, UK), and Metastat (Aeterna, St-Foy, Quebec). Examples of anti-angiogenic inhibitors that act by blocking the function of endothelial cell-extracellular matrix adhesion molecules and which may be administered in combination with the compositons of the invention include, but are not lmited to, EMD-121974 (Merck KcgaA Darmstadt, Germany) and Vitaxin (Ixsys, La Jolla, Calif. /Medimmune, Gaithersburg, Md.). Examples of anti-angiogenic agents that act by directly antagonizing or inhibiting angiogenesis inducers and which may be administered in combination with the compositons of the invention include, but are not lmited to, Angiozyme (Ribozyme, Boulder, Colo.), Anti-VEGF antibody (Genentech, S. San Francisco, Calif.), PTK-787/ZK-225846 (Novartis, Basel, Switzerland), SU-101 (Sugen, S. San Francisco, Calif.), SU-5416 (Sugen/ Pharmacia Upjohn, Bridgewater, N.J.), and SU-6668 (Sugen). Other anti-angiogenic agents act to indirectly inhibit angiogenesis. Examples of indirect inhibitors of angiogenesis which may be administered in combination with the compositons of the invention include, but are not limited to, IM-862 (Cytran, Kirkland, Wash.), Interferon-alpha, IL-12 (Roche, Nutley, N.J.), and Pentosan polysulfate (Georgetown University, Washington, D.C.).

[1065] In particular embodiments, the use of compositions of the invention in combination with anti-angiogenic agents is contemplated for the treatment, prevention, and/or amelioration of an autoimmune disease, such as for example, an autoimmune disease described herein.

[1066] In a particular embodiment, the use of compositions of the invention in combination with anti-angiogenic agents is contemplated for the treatment, prevention, and/or amelioration of arthritis. In a more particular embodiment, the use of compositions of the invention in combination with anti-angiogenic agents is contemplated for the treatment, prevention, and/or amelioration of rheumatoid arthritis.

[1067] In another embodiment, the polynucleotides encoding a polypeptide of the present invention are administered in combination with an angiogenic protein, or polynucleotides encoding an angiogenic protein. Examples of angiogenic proteins that may be administered with the compositions of the invention include, but are not limited to, acidic and basic fibroblast growth factors, VEGF-1, VEGF-2, VEGF-3, epidermal growth factor alpha and beta, platelet-derived endothelial cell growth factor, platelet-derived growth factor, tumor necrosis factor alpha, hepatocyte growth factor, insulin-like growth factor, colony stimulating factor, macrophage colony stimulating factor, granulocyte/macrophage colony stimulating factor, and nitric oxide synthase.

[1068] In additional embodiments, compostions of the invention are administered in combination with a chemotherapeutic agent. Chemotherapeutic agents that may be administered with the Therapeutics of the invention include, but are not limited to alkylating agents such as nitrogen mustards (for example, Mechlorethamine, cyclophosphamide, Cyclophosphamide Ifosfamide, Melphalan (L-sarcolysin), and Chlorambucil), ethylenimines and methylmelamines (for example, Hexamethylmelamine and Thiotepa), alkyl sulfonates (for example, Busulfan), nitrosoureas (for example, Carmustine (BCNU), Lomustine (CCNU), Semustine (methyl-CCNU), and Streptozocin (streptozotocin)), triazenes (for example, Dacarbazine (DTIC; dimethyltriazenoimidazolecarboxamide)), folic acid analogs (for example, Methotrexate (amethopterin)), pyrimidine analogs (for example, Fluorouacil (5-fluorouracil; 5-FU), Floxuridine (fluorodeoxyuridine; FudR), and Cytarabine (cytosine arabinoside)), purine analogs and related inhibitors (for example, Mercaptopurine (6-mercaptopurine; 6-MP), Thioguanine (6-thioguanine; TG), and Pentostatin (2′-deoxycoformycin)), vinca alkaloids (for example, Vinblastine (VLB, vinblastine sulfate) and Vincristine (vincristine sulfate)), epipodophyllotoxins (for example, Etoposide and Teniposide), antibiotics (for example, Dactinomycin (actinomycin D), Daunorubicin (daunomycin; rubidomycin), Doxorubicin, Bleomycin, Plicamycin (mithramycin), and Mitomycin (mitomycin C), enzymes (for example, L-Asparaginase), biological response modifiers (for example, Interferon-alpha and interferon-alpha-2b), platinum coordination compounds (for example, Cisplatin (cis-DDP) and Carboplatin), anthracenedione (Mitoxantrone), substituted ureas (for example, Hydroxyurea), methylhydrazine derivatives (for example, Procarbazine (N-methylhydrazine; MIH), adrenocorticosteroids (for example, Prednisone), progestins (for example, Hydroxyprogesterone caproate, Medroxyprogesterone, Medroxyprogesterone acetate, and Megestrol acetate), estrogens (for example, Diethylstilbestrol (DES), Diethylstilbestrol diphosphate, Estradiol, and Ethinyl estradiol), antiestrogens (for example, Tamoxifen), androgens (Testosterone proprionate, and Fluoxymesterone), antiandrogens (for example, Flutamide), gonadotropin-releasing horomone analogs (for example, Leuprolide), other hormones and hormone analogs (for example, methyltestosterone, estramustine, estramustine phosphate sodium, chlorotrianisene, and testolactone), and others (for example, dicarbazine, glutamic acid, and mitotane).

[1069] In one embodiment, the compositions of the invention are administered in combination with one or more of the following drugs: infliximab (also known as Remicade™ Centocor, Inc.), Trocade (Roche, RO-32-3555), Leflunomide (also known as Arava™ from Hoechst Marion Roussel), Kineret™ (an IL-1 Receptor antagonist also known as Anakinra from Amgen, Inc.).

[1070] In a specific embodiment, compositions of the invention are administered in combination with CHOP (cyclophosphamide, doxorubicin, vincristine, and prednisone) or combination of one or more of the components of CHOP. In one embodiment, the compositions of the invention are administered in combination with anti-CD20 antibodies, human monoclonal anti-CD20 antibodies. In another embodiment, the compositions of the invention are administered in combination with anti-CD20 antibodies and CHOP, or anti-CD20 antibodies and any combination of one or more of the components of CHOP, particularly cyclophosphamide and/or prednisone. In a specific embodiment, compositions of the invention are administered in combination with Rituximab. In a further embodiment, compositions of the invention are administered with Rituximab and CHOP, or Rituximab and any combination of one or more of the components of CHOP, particularly cyclophosphamide and/or prednisone. In a specific embodiment, compositions of the invention are administered in combination with tositumomab. In a further embodiment, compositions of the invention are administered with tositumomab and CHOP, or tositumomab and any combination of one or more of the components of CHOP, particularly cyclophosphamide and/or prednisone. The anti-CD20 antibodies may optionally be associated with radioisotopes, toxins or cytotoxic prodrugs.

[1071] In another specific embodiment, the compositions of the invention are administered in combination Zevalin™. In a further embodiment, compositions of the invention are administered with Zevalin™ and CHOP, or Zevalin™ and any combination of one or more of the components of CHOP, particularly cyclophosphamide and/or prednisone. Zevalin™ may be associated with one or more radisotopes. Particularly preferred isotopes are ⁹⁰Y and ¹¹¹In.

[1072] In an additional embodiment, the Therapeutics of the invention are administered in combination with cytokines. Cytokines that may be administered with the Therapeutics of the invention include, but are not limited to, IL2, IL3, IL4, IL5, IL6, IL7, IL10, IL12, IL13, IL15, anti-CD40, CD40L, IFN-gamma and TNF-alpha. In another embodiment, Therapeutics of the invention may be administered with any interleukin, including, but not limited to, IL-1alpha, IL-1beta, IL-2, IL-3, IL-4, IL-5, IL-6, IL-7, IL-8, IL-9, IL-10, IL-11, IL-12, IL-13, IL-14, IL-15, IL-16, IL-17, IL-18, IL-19, IL-20, and IL21.

[1073] In one embodiment, the Therapeutics of the invention are administered in combination with members of the TNF family. TNF, TNF-related or TNF-like molecules that may be administered with the Therapeutics of the invention include, but are not limited to, soluble forms of TNF-alpha, lymphotoxin-alpha (LT-alpha, also known as TNF-beta), LT-beta (found in complex heterotrimer LT-alpha2-beta), OPGL, FasL, CD27L, CD30L, CD40L, 4-1BBL, DcR3, OX40L, TNF-gamma (International Publication No. WO 96/14328), AIM-I (International Publication No. WO 97/33899), endokine-alpha (International Publication No. WO 98/07880), OPG, and neutrokine-alpha (International Publication No. WO 98/18921, OX40, and nerve growth factor (NGF), and soluble forms of Fas, CD30, CD27, CD40 and 4-IBB, TR2 (International Publication No. WO 96/34095), DR3 (International Publication No. WO 97/33904), DR4 (International Publication No. WO 98/32856), TR5 (International Publication No. WO 98/30693), TRANK, TR9 (International Publication No. WO 98/56892), TR10 (International Publication No. WO 98/54202), 312C2 (International Publication No. WO 98/06842), and TR12, and soluble forms CD154, CD70, and CD153.

[1074] In an additional embodiment, the Therapeutics of the invention are administered in combination with angiogenic proteins. Angiogenic proteins that may be administered with the Therapeutics of the invention include, but are not limited to, Glioma Derived Growth Factor (GDGF), as disclosed in European Patent Number EP-399816; Platelet Derived Growth Factor-A (PDGF-A), as disclosed in European Patent Number EP-682110; Platelet Derived Growth Factor-B (PDGF-B), as disclosed in European Patent Number EP-282317; Placental Growth Factor (PlGF), as disclosed in International Publication Number WO 92/06194; Placental Growth Factor-2 (PlGF-2), as disclosed in Hauser et al., Growth Factors, 4:259-268 (1993); Vascular Endothelial Growth Factor (VEGF), as disclosed in International Publication Number WO 90/13649; Vascular Endothelial Growth Factor-A (VEGF-A), as disclosed in European Patent Number EP-506477; Vascular Endothelial Growth Factor-2 (VEGF-2), as disclosed in International Publication Number WO 96/39515; Vascular Endothelial Growth Factor B (VEGF-3); Vascular Endothelial Growth Factor B-186 (VEGF-B186), as disclosed in International Publication Number WO 96/26736; Vascular Endothelial Growth Factor-D (VEGF-D), as disclosed in International Publication Number WO 98/02543; Vascular Endothelial Growth Factor-D (VEGF-D), as disclosed in International Publication Number WO 98/07832; and Vascular Endothelial Growth Factor-E (VEGF-E), as disclosed in German Patent Number DE19639601. The above mentioned references are herein incorporated by reference in their entireties.

[1075] In an additional embodiment, the Therapeutics of the invention are administered in combination with Fibroblast Growth Factors. Fibroblast Growth Factors that may be administered with the Therapeutics of the invention include, but are not limited to, FGF-1, FGF-2, FGF-3, FGF-4, FGF-5, FGF-6, FGF-7, FGF-8, FGF-9, FGF-10, FGF-11, FGF-12, FGF-13, FGF-14, and FGF-15.

[1076] In an additional embodiment, the Therapeutics of the invention are administered in combination with hematopoietic growth factors. Hematopoietic growth factors that may be administered with the Therapeutics of the invention include, but are not limited to, granulocyte macrophage colony stimulating factor (GM-CSF) (sargramostim, LEUKINE™, PROKINE™), granulocyte colony stimulating factor (G-CSF) (filgrastim, NEUPOGEN™), macrophage colony stimulating factor (M-CSF, CSF-1) erythropoietin (epoetin alfa, EPOGEN™, PROCRIT™), stem cell factor (SCF, c-kit ligand, steel factor), megakaryocyte colony stimulating factor, PIXY321 (a GMCSF/IL-3 fusion protein), interleukins, especially any one or more of IL-1 through IL-12, interferon-gamma, or thrombopoietin.

[1077] In certain embodiments, Therapeutics of the present invention are administered in combination with adrenergic blockers, such as, for example, acebutolol, atenolol, betaxolol, bisoprolol, carteolol, labetalol, metoprolol, nadolol, oxprenolol, penbutolol, pindolol, propranolol, sotalol, and timolol.

[1078] In another embodiment, the Therapeutics of the invention are administered in combination with an antiarrhythmic drug (e.g., adenosine, amidoarone, bretylium, digitalis, digoxin, digitoxin, diliazem, disopyramide, esmolol, flecainide, lidocaine, mexiletine, moricizine, phenytoin, procainamide, N-acetyl procainamide, propafenone, propranolol, quinidine, sotalol, tocainide, and verapamil).

[1079] In another embodiment, the Therapeutics of the invention are administered in combination with diuretic agents, such as carbonic anhydrase-inhibiting agents (e.g., acetazolamide, dichlorphenamide, and methazolamide), osmotic diuretics (e.g., glycerin, isosorbide, mannitol, and urea), diuretics that inhibit Na⁺—K⁺—2C⁻ symport (e.g., furosemide, bumetanide, azosemide, piretanide, tripamide, ethacrynic acid, muzolimine, and torsemide), thiazide and thiazide-like diuretics (e.g., bendroflumethiazide, benzthiazide, chlorothiazide, hydrochlorothiazide, hydroflumethiazide, methyclothiazide, polythiazide, trichormethiazide, chlorthalidone, indapamide, metolazone, and quinethazone), potassium sparing diuretics (e.g., amiloride and triamterene), and mineralcorticoid receptor antagonists (e.g., spironolactone, canrenone, and potassium canrenoate).

[1080] In one embodiment, the Therapeutics of the invention are administered in combination with treatments for endocrine and/or hormone imbalance disorders. Treatments for endocrine and/or hormone imbalance disorders include, but are not limited to, ¹²⁷I, radioactive isotopes of iodine such as ¹³¹I and ¹²³I; recombinant growth hormone, such as HUMATROPE™ (recombinant somatropin); growth hormone analogs such as PROTROPIN™ (somatrem); dopamine agonists such as PARLODEL™ (bromocriptine); somatostatin analogs such as SANDOSTATIN™ (octreotide); gonadotropin preparations such as PREGNYL™, A.P.L.™ and PROFASI™ (chorionic gonadotropin (CG)), PERGONAL™ (menotropins), and METRODIN™ (urofollitropin (uFSH)); synthetic human gonadotropin releasing hormone preparations such as FACTREL™ and LUTREPULSE™ (gonadorelin hydrochloride); synthetic gonadotropin agonists such as LUPRON™ (leuprolide acetate), SUPPRELIN™ (histrelin acetate), SYNAREL™ (nafarelin acetate), and ZOLADEX™ (goserelin acetate); synthetic preparations of thyrotropin-releasing hormone such as RELEFACT TRH™ and THYPINONE™ (protirelin); recombinant human TSH such as THYROGEN™; synthetic preparations of the sodium salts of the natural isomers of thyroid hormones such as L-T₄™, SYNTHROID™0 and LEVOTHROID™ (levothyroxine sodium), L-T₃™, CYTOMEL™ and TRIOSTAT™ (liothyroine sodium), and THYROLAR™ (liotrix); antithyroid compounds such as 6-n-propylthiouracil (propylthiouracil), 1-methyl-2-mercaptoimidazole and TAPAZOLE™ (methimazole), NEO-MERCAZOLE™ (carbimazole); beta-adrenergic receptor antagonists such as propranolol and esmolol; Ca²⁺ channel blockers; dexamethasone and iodinated radiological contrast agents such as TELEPAQUE™0 (iopanoic acid) and ORAGRAFIN™ (sodium ipodate); estrogens or congugated estrogens such as ESTRACE™ (estradiol), ESTINYL™ (ethinyl estradiol), PREMARIN™, ESTRATAB™, ORTHO-EST™, OGEN™ and estropipate (estrone), ESTROVIS™ (quinestrol), ESTRADERM™ (estradiol), DELESTROGEN™ and VALERGEN™ (estradiol valerate), DEPO-ESTRADIOL CYPIONATE™ and ESTROJECT LA™ (estradiol cypionate); antiestrogens such as NOLVADEX™ (tamoxifen), SEROPHENE™ and CLOMID™ (clomiphene); progestins such as DURALUTIN™ (hydroxyprogesterone caproate), MPA™ and DEPO-PROVERA™ (medroxyprogesterone acetate), PROVERA™ and CYCRIN™ (MPA), MEGACE™ (megestrol acetate), NORLUTIN™ (norethindrone), and NORLUTATE™ and AYGESTIN™ (norethindrone acetate); progesterone implants such as NORPLANT SYSTEM™ (subdermal implants of norgestrel); antiprogestins such as RU 486™ (mifepristone); hormonal contraceptives such as ENOVID™ (norethynodrel plus mestranol), PROGESTASERT™ (intrauterine device that releases progesterone), LOESTRIN™, BREVICON™, MODICON™, GENORA™, NELONA™, NORINYL™, OVACON-35™ and OVACON-5™ (ethinyl estradiol/norethindrone), LEVLEN™, NORDETTE™, TRI-LEVLEN™ and TRIPHASIL-21™ (ethinyl estradiol/levonorgestrel) LO/OVRAL™ and OVRAL™ (ethinyl estradiol/norgestrel), DEMULEN™ (ethinyl estradiol/ethynodiol diacetate), NORINYL™, ORTHO-NOVUM™, NORETHIN™, GENORA™, and NELOVA™ (norethindrone/mestranol), DESOGEN™ and ORTHO-CEPT™ (ethinyl estradiol/desogestrel), ORTHO-CYCLEN™ and ORTHO-TRICYCLEN™ (ethinyl estradiol/norgestimate), MICRONOR™ and NOR-QD™ (norethindrone), and OVRETTE™ (norgestrel); testosterone esters such as methenolone acetate and testosterone undecanoate; parenteral and oral androgens such as TESTOJECT-50™ (testosterone), TESTEX™ (testosterone propionate), DELATESTRYL™ (testosterone enanthate), DEPO-TESTOSTERONE™ (testosterone cypionate), DANOCRINE™ (danazol), HALOTESTIN™ (fluoxymesterone), ORETON METHYL™, TESTRED™ and VIRILON™ (methyltestosterone), and OXANDRIN™ (oxandrolone); testosterone transdermal systems such as TESTODERM™; androgen receptor antagonist and 5-alpha-reductase inhibitors such as ANDROCUR™ (cyproterone acetate), EULEXIN™ (flutamide), and PROSCAR™ (finasteride); adrenocorticotropic hormone preparations such as CORTROSYN™ (cosyntropin); adrenocortical steroids and their synthetic analogs such as ACLOVATE™ (alclometasone dipropionate), CYCLOCORT™ (amcinonide), BECLOVENT™ and VANCERIL™ (beclomethasone dipropionate), CELESTONE™ (betamethasone), BENISONE™ and UTICORT™ (betamethasone benzoate), DIPROSONE™ (betamethasone dipropionate), CELESTONE PHOSPHATE™ (betamethasone sodium phosphate), CELESTONE SOLUSPAN™ (betamethasone sodium phosphate and acetate), BETA-VAL™ and VALISONE™ (betamethasone valerate), TEMOVATET™ (clobetasol propionate), CLODERM™ (clocortolone pivalate), CORTEF™ and HYDROCORTONE™ (cortisol (hydrocortisone)), HYDROCORTONE ACETATE™ (cortisol (hydrocortisone) acetate), LOCOID™ (cortisol (hydrocortisone) butyrate), HYDROCORTONE PHOSPHATE™ (cortisol (hydrocortisone) sodium phosphate), A-HYDROCORT™ and SOLU CORTEF™ (cortisol (hydrocortisone) sodium succinate), WESTCORT™ (cortisol (hydrocortisone) valerate), CORTISONE ACETATE™ (cortisone acetate), DESOWEN™ and TRIDESILON™ (desonide), TOPICORT™ (desoximetasone), DECADRON™ (dexamethasone), DECADRON LA™ (dexamethasone acetate), DECADRON PHOSPHATE™ and HEXADROL PHOSPHATE™ (dexamethasone sodium phosphate), FLORONE™ and MAXIFLO™ (diflorasone diacetate), FLORINEF ACETATE™ (fludrocortisone acetate), AEROBID™ and NASALIDE™ (flunisolide), FLUONID™ and SYNALAR™ (fluocinolone acetonide), LIDEX™ (fluocinonide), FLUOR-OP™ and FML™ (fluorometholone), CORDRAN™ (flurandrenolide), HALOG™ (halcinonide), HMS LIZUIFILM™ (medrysone), MEDROL™ (methylprednisolone), DEPO-MEDROL™ and MEDROL ACETATE™ (methylprednisone acetate), A-METHAPRED™ and SOLUMEDROL™ (methylprednisolone sodium succinate), ELOCON™ (mometasone furoate), HALDRONE™ (paramethasone acetate), DELTA-CORTEF™ (prednisolone), ECONOPRED™ (prednisolone acetate), HYDELTRASOL™ (prednisolone sodium phosphate), HYDELTRA-T.B.A™ (prednisolone tebutate), DELTASONE™ (prednisone), ARISTOCORT™ and KENACORT™ (triamcinolone), KENALOG™ (triamcinolone acetonide), ARISTOCORT™ and KENACORT DIACETATE™ (triamcinolone diacetate), and ARISTOSPAN™ (triamcinolone hexacetonide); inhibitors of biosynthesis and action of adrenocortical steroids such as CYTADREN™ (aminoglutethimide), NIZORAL™ (ketoconazole), MODRASTANE™ (trilostane), and METOPIRONE™ (metyrapone); bovine, porcine or human insulin or mixtures thereof; insulin analogs; recombinant human insulin such as HUMULIN™ and NOVOLIN™; oral hypoglycemic agents such as ORAMIDE™ and ORINASE™ (tolbutamide), DIABINESE™ (chlorpropamide), TOLAMIDE™ and TOLINASE™ (tolazamide), DYMELOR™ (acetohexamide), glibenclamide, MICRONASE™, DIBETA™ and GLYNASE™ (glyburide), GLUCOTROL™ (glipizide), and DIAMICRON™ (gliclazide), GLUCOPHAGE™ (metformin), ciglitazone, pioglitazone, and alpha-glucosidase inhibitors; bovine or porcine glucagon; somatostatins such as SANDOSTATIN™ (octreotide); and diazoxides such as PROGLYCEM™ (diazoxide).

[1081] In one embodiment, the Therapeutics of the invention are administered in combination with treatments for uterine motility disorders. Treatments for uterine motility disorders include, but are not limited to, estrogen drugs such as conjugated estrogens (e.g., PREMARIN® and ESTRATAB®), estradiols (e.g., CLIMARA® and ALORA®), estropipate, and chlorotrianisene; progestin drugs (e.g., AMEN® (medroxyprogesterone), MICRONOR® (norethidrone acetate), PROMETRIUM® progesterone, and megestrol acetate); and estrogen/progesterone combination therapies such as, for example, conjugated estrogens/medroxyprogesterone (e.g., PREMPRO™ and PREMPHASE®) and norethindrone acetate/ethinyl estsradiol (e.g., FEMHR™).

[1082] In an additional embodiment, the Therapeutics of the invention are administered in combination with drugs effective in treating iron deficiency and hypochromic anemias, including but not limited to, ferrous sulfate (iron sulfate, FEOSOLTM), ferrous fumarate (e.g., FEOSTAT™), ferrous gluconate (e.g., FERGON™), polysaccharide-iron complex (e.g., NIFEREX™), iron dextran injection (e.g., INFED™), cupric sulfate, pyroxidine, riboflavin, Vitamin B₁₂, cyancobalamin injection (e.g., REDISOL™, RUBRAMIN PC™), hydroxocobalamin, folic acid (e.g., FOLVITE™), leucovorin (folinic acid, 5-CHOH4PteGlu, citrovorum factor) or WELLCOVORIN (Calcium salt of leucovorin), transferrin or ferritin.

[1083] In certain embodiments, the Therapeutics of the invention are administered in combination with agents used to treat psychiatric disorders. Psychiatric drugs that may be administered with the Therapeutics of the invention include, but are not limited to, antipsychotic agents (e.g., chlorpromazine, chlorprothixene, clozapine, fluphenazine, haloperidol, loxapine, mesoridazine, molindone, olanzapine, perphenazine, pimozide, quetiapine, risperidone, thioridazine, thiothixene, trifluoperazine, and triflupromazine), antimanic agents (e.g., carbamazepine, divalproex sodium, lithium carbonate, and lithium citrate), antidepressants (e.g., amitriptyline, amoxapine, bupropion, citalopram, clomipramine, desipramine, doxepin, fluvoxamine, fluoxetine, imipramine, isocarboxazid, maprotiline, mirtazapine, nefazodone, nortriptyline, paroxetine, phenelzine, protriptyline, sertraline, tranylcypromine, trazodone, trimipramine, and venlafaxine), antianxiety agents (e.g., alprazolam, buspirone, chlordiazepoxide, clorazepate, diazepam, halazepam, lorazepam, oxazepam, and prazepam), and stimulants (e.g., d-amphetamine, methylphenidate, and pemoline).

[1084] In other embodiments, the Therapeutics of the invention are administered in combination with agents used to treat neurological disorders. Neurological agents that may be administered with the Therapeutics of the invention include, but are not limited to, antiepileptic agents (e.g., carbamazepine, clonazepam, ethosuximide, phenobarbital, phenytoin, primidone, valproic acid, divalproex sodium, felbamate, gabapentin, lamotrigine, levetiracetam, oxcarbazepine, tiagabine, topiramate, zonisamide, diazepam, lorazepam, and clonazepam), antiparkinsonian agents (e.g., levodopa/carbidopa, selegiline, amantidine, bromocriptine, pergolide, ropinirole, pramipexole, benztropine; biperiden; ethopropazine; procyclidine; trihexyphenidyl, tolcapone), and ALS therapeutics (e.g. riluzole).

[1085] In another embodiment, Therapeutics of the invention are administered in combination with vasodilating agents and/or calcium channel blocking agents. Vasodilating agents that may be administered with the Therapeutics of the invention include, but are not limited to, Angiotensin Converting Enzyme (ACE) inhibitors (e.g., papaverine, isoxsuprine, benazepril, captopril, cilazapril, enalapril, enalaprilat, fosinopril, lisinopril, moexipril, perindopril, quinapril, ramipril, spirapril, trandolapril, and nylidrin), and nitrates (e.g., isosorbide dinitrate, isosorbide mononitrate, and nitroglycerin). Examples of calcium channel blocking agents that may be administered in combination with the Therapeutics of the invention include, but are not limited to amlodipine, bepridil, diltiazem, felodipine, flunarizine, isradipine, nicardipine, nifedipine, nimodipine, and verapamil.

[1086] In additional embodiments, the Therapeutics of the invention are administered in combination with other therapeutic or prophylactic regimens, such as, for example, radiation therapy.

### Example 14

[1087] Method of Treating Decreased Levels of the Polypeptide

[1088] The present invention relates to a method for treating an individual in need of an increased level of a polypeptide of the invention in the body comprising administering to such an individual a composition comprising a therapeutically effective amount of an agonist of the invention (including polypeptides of the invention). Moreover, it will be appreciated that conditions caused by a decrease in the standard or normal expression level of a polypeptide of the present invention in an individual can be treated by administering the agonist or antagonist of the present invention. Thus, the invention also provides a method of treatment of an individual in need of an increased level of the polypeptide comprising administering to such an individual a Therapeutic comprising an amount of the agonist or antagonist to increase the activity level of the polypeptide in such an individual.

[1089] For example, a patient with decreased levels of a polypeptide receives a daily dose 0.1-100 ug/kg of the agonist or antagonist for six consecutive days. The exact details of the dosing scheme, based on administration and formulation, are provided in Example 13.

### Example 15

[1090] Method of Treating Increased Levels of the Polypeptide

[1091] The present invention also relates to a method of treating an individual in need of a decreased level of a polypeptide of the invention in the body comprising administering to such an individual a composition comprising a therapeutically effective amount of an antagonist of the invention (including polypeptides and antibodies of the invention).

[1092] In one example, antisense technology is used to inhibit production of a polypeptide of the present invention. This technology is one example of a method of decreasing levels of a polypeptide, due to a variety of etiologies, such as cancer.

[1093] For example, a patient diagnosed with abnormally increased levels of a polypeptide is administered intravenously antisense polynucleotides at 0.5, 1.0, 1.5, 2.0 and 3.0 mg/kg day for 21 days. This treatment is repeated after a 7-day rest period if the treatment was well tolerated. The formulation of the antisense polynucleotide is provided in Example 13.

### Example 16

[1094] Method of Treatment Using Gene Therapy—Ex Vivo

[1095] One method of gene therapy transplants fibroblasts, which are capable of expressing a polypeptide, onto a patient. Generally, fibroblasts are obtained from a subject by skin biopsy. The resulting tissue is placed in tissue-culture medium and separated into small pieces. Small chunks of the tissue are placed on a wet surface of a tissue culture flask, approximately ten pieces are placed in each flask. The flask is turned upside down, closed tight and left at room temperature over night. After 24 hours at room temperature, the flask is inverted and the chunks of tissue remain fixed to the bottom of the flask and fresh media (e.g., Ham's F12 media, with 10% FBS, penicillin and streptomycin) is added. The flasks are then incubated at 37 degree C. for approximately one week.

[1096] At this time, fresh media is added and subsequently changed every several days. After an additional two weeks in culture, a monolayer of fibroblasts emerge. The monolayer is trypsinized and scaled into larger flasks.

[1097] pMV-7 (Kirschmeier, P. T. et al., DNA, 7:219-25 (1988)), flanked by the long terminal repeats of the Moloney murine sarcoma virus, is digested with EcoRI and HindIII and subsequently treated with calf intestinal phosphatase. The linear vector is fractionated on agarose gel and purified, using glass beads.

[1098] The cDNA encoding a polypeptide of the present invention can be amplified using PCR primers which correspond to the 5′ and 3′ end sequences respectively as set forth in Example 1 using primers and having appropriate restriction sites and initiation/stop codons, if necessary. Preferably, the 5′ primer contains an EcoRI site and the 3′ primer includes a HindIII site. Equal quantities of the Moloney murine sarcoma virus linear backbone and the amplified EcoRI and HindIII fragment are added together, in the presence of T4 DNA ligase. The resulting mixture is maintained under conditions appropriate for ligation of the two fragments. The ligation mixture is then used to transform bacteria HB101, which are then plated onto agar containing kanamycin for the purpose of confirming that the vector has the gene of interest properly inserted.

[1099] The amphotropic pA317 or GP+am12 packaging cells are grown in tissue culture to confluent density in Dulbecco's Modified Eagles Medium (DMEM) with 10% calf serum (CS), penicillin and streptomycin. The MSV vector containing the gene is then added to the media and the packaging cells transduced with the vector. The packaging cells now produce infectious viral particles containing the gene (the packaging cells are now referred to as producer cells).

[1100] Fresh media is added to the transduced producer cells, and subsequently, the media is harvested from a 10 cm plate of confluent producer cells. The spent media, containing the infectious viral particles, is filtered through a millipore filter to remove detached producer cells and this media is then used to infect fibroblast cells. Media is removed from a sub-confluent plate of fibroblasts and quickly replaced with the media from the producer cells. This media is removed and replaced with fresh media. If the titer of virus is high, then virtually all fibroblasts will be infected and no selection is required. If the titer is very low, then it is necessary to use a retroviral vector that has a selectable marker, such as neo or his. Once the fibroblasts have been efficiently infected, the fibroblasts are analyzed to determine whether protein is produced.

[1101] The engineered fibroblasts are then transplanted onto the host, either alone or after having been grown to confluence on cytodex 3 microcarrier beads.

### Example 17

[1102] Gene Therapy Using Endogenous Genes Corresponding to Polynucleotides of the Invention

[1103] Another method of gene therapy according to the present invention involves operably associating the endogenous polynucleotide sequence of the invention with a promoter via homologous recombination as described, for example, in U.S. Pat. No. 5,641,670, issued Jun. 24, 1997; International Publication NO: WO 96/29411, published Sep. 26, 1996; International Publication NO: WO 94/12650, published Aug. 4, 1994; Koller et al., Proc. Natl. Acad. Sci. USA, 86:8932-8935 (1989); and Zijlstra et al., Nature, 342:435-438 (1989). This method involves the activation of a gene which is present in the target cells, but which is not expressed in the cells, or is expressed at a lower level than desired.

[1104] Polynucleotide constructs are made which contain a promoter and targeting sequences, which are homologous to the 5′ non-coding sequence of endogenous polynucleotide sequence, flanking the promoter. The targeting sequence will be sufficiently near the 5′ end of the polynucleotide sequence so the promoter will be operably linked to the endogenous sequence upon homologous recombination. The promoter and the targeting sequences can be amplified using PCR. Preferably, the amplified promoter contains distinct restriction enzyme sites on the 5′ and 3′ ends. Preferably, the 3′ end of the first targeting sequence contains the same restriction enzyme site as the 5′ end of the amplified promoter and the 5′ end of the second targeting sequence contains the same restriction site as the 3′ end of the amplified promoter.

[1105] The amplified promoter and the amplified targeting sequences are digested with the appropriate restriction enzymes and subsequently treated with calf intestinal phosphatase. The digested promoter and digested targeting sequences are added together in the presence of T4 DNA ligase. The resulting mixture is maintained under conditions appropriate for ligation of the two fragments. The construct is size fractionated on an agarose gel, then purified by phenol extraction and ethanol precipitation.

[1106] In this Example, the polynucleotide constructs are administered as naked polynucleotides via electroporation. However, the polynucleotide constructs may also be administered with transfection-facilitating agents, such as liposomes, viral sequences, viral particles, precipitating agents, etc. Such methods of delivery are known in the art.

[1107] Once the cells are transfected, homologous recombination will take place which results in the promoter being operably linked to the endogenous polynucleotide sequence. This results in the expression of polynucleotide corresponding to the polynucleotide in the cell. Expression may be detected by immunological staining, or any other method known in the art.

[1108] Fibroblasts are obtained from a subject by skin biopsy. The resulting tissue is placed in DMEM+10% fetal calf serum. Exponentially growing or early stationary phase fibroblasts are trypsinized and rinsed from the plastic surface with nutrient medium. An aliquot of the cell suspension is removed for counting, and the remaining cells are subjected to centrifugation. The supernatant is aspirated and the pellet is resuspended in 5 ml of electroporation buffer (20 mM HEPES pH 7.3, 137 mM NaCl, 5 mM KCl, 0.7 mM Na₂ HPO₄, 6 mM dextrose). The cells are recentrifuged, the supernatant aspirated, and the cells resuspended in electroporation buffer containing 1 mg/ml acetylated bovine serum albumin. The final cell suspension contains approximately 3×10 ⁶ cells/ml. Electroporation should be performed immediately following resuspension.

[1109] Plasmid DNA is prepared according to standard techniques. For example, to construct a plasmid for targeting to the locus corresponding to the polynucleotide of the invention, plasmid pUC 18 (MBI Fermentas, Amherst, N.Y.) is digested with HindIII. The CMV promoter is amplified by PCR with an XbaI site on the 5′ end and a BamHI site on the 3′ end. Two non-coding sequences are amplified via PCR: one non-coding sequence (fragment 1) is amplified with a HindIII site at the 5′ end and an Xba site at the 3′ end; the other non-coding sequence (fragment 2) is amplified with a BamHI site at the 5′ end and a HindIII site at the 3′ end. The CMV promoter and the fragments (1 and 2) are digested with the appropriate enzymes (CMV promoter—XbaI and BamHI; fragment 1—XbaI; fragment 2—BamHI) and ligated together. The resulting ligation product is digested with HindIII, and ligated with the HindIII-digested pUC18 plasmid.

[1110] Plasmid DNA is added to a sterile cuvette with a 0.4 cm electrode gap (Bio-Rad). The final DNA concentration is generally at least 120 μg/ml. 0.5 ml of the cell suspension (containing approximately 1.5.×10⁶ cells) is then added to the cuvette, and the cell suspension and DNA solutions are gently mixed. Electroporation is performed with a Gene-Pulser apparatus (Bio-Rad). Capacitance and voltage are set at 960 μF and 250-300 V, respectively. As voltage increases, cell survival decreases, but the percentage of surviving cells that stably incorporate the introduced DNA into their genome increases dramatically. Given these parameters, a pulse time of approximately 14-20 mSec should be observed.

[1111] Electroporated cells are maintained at room temperature for approximately 5 min, and the contents of the cuvette are then gently removed with a sterile transfer pipette. The cells are added directly to 10 ml of prewarmed nutrient media (DMEM with 15% calf serum) in a 10 cm dish and incubated at 37 degree C. The following day, the media is aspirated and replaced with 10 ml of fresh media and incubated for a further 16-24 hours.

[1112] The engineered fibroblasts are then injected into the host, either alone or after having been grown to confluence on cytodex 3 microcarrier beads. The fibroblasts now produce the protein product. The fibroblasts can then be introduced into a patient as described above.

### Example 18

[1113] Method of Treatment Using Gene Therapy—In Vivo

[1114] Another aspect of the present invention is using in vivo gene therapy methods to treat disorders, diseases and conditions. The gene therapy method relates to the introduction of naked nucleic acid (DNA, RNA, and antisense DNA or RNA) sequences into an animal to increase or decrease the expression of the polypeptide. The polynucleotide of the present invention may be operatively linked to (i.e., associated with) a promoter or any other genetic elements necessary for the expression of the polypeptide by the target tissue. Such gene therapy and delivery techniques and methods are known in the art, see, for example, WO90/11092, WO98/11779; U.S. Pat. Nos. 5693622, 5705151, 5580859; Tabata et al., Cardiovasc. Res. 35(3):470-479 (1997); Chao et al., Pharmacol. Res. 35(6):517-522 (1997); Wolff, Neuromuscul. Disord. 7(5):314-318 (1997); Schwartz et al., Gene Ther. 3(5):405-411 (1996); Tsurumi et al., Circulation 94(12):3281-3290 (1996) (incorporated herein by reference).

[1115] The polynucleotide constructs may be delivered by any method that delivers injectable materials to the cells of an animal, such as, injection into the interstitial space of tissues (heart, muscle, skin, lung, liver, intestine and the like). The polynucleotide constructs can be delivered in a pharmaceutically acceptable liquid or aqueous carrier.

[1116] The term “naked” polynucleotide, DNA or RNA, refers to sequences that are free from any delivery vehicle that acts to assist, promote, or facilitate entry into the cell, including viral sequences, viral particles, liposome formulations, lipofectin or precipitating agents and the like. However, the polynucleotides of the present invention may also be delivered in liposome formulations (such as those taught in Felgner P. L. et al. (1995) Ann. NY Acad. Sci. 772:126-139 and Abdallah B. et al. (1995) Biol. Cell 85(1):1-7) which can be prepared by methods well known to those skilled in the art.

[1117] The polynucleotide vector constructs used in the gene therapy method are preferably constructs that will not integrate into the host genome nor will they contain sequences that allow for replication. Any strong promoter known to those skilled in the art can be used for driving the expression of DNA. Unlike other gene therapy techniques, one major advantage of introducing naked nucleic acid sequences into target cells is the transitory nature of the polynucleotide synthesis in the cells. Studies have shown that non-replicating DNA sequences can be introduced into cells to provide production of the desired polypeptide for periods of up to six months.

[1118] The polynucleotide construct can be delivered to the interstitial space of tissues within an animal, including muscle, skin, brain, lung, liver, spleen, bone marrow, thymus, heart, lymph, blood, bone, cartilage, pancreas, kidney, gall bladder, stomach, intestine, testis, ovary, uterus, rectum, nervous system, eye, gland, and connective tissue. Interstitial space of the tissues comprises the intercellular fluid, mucopolysaccharide matrix among the reticular fibers of organ tissues, elastic fibers in the walls of vessels or chambers, collagen fibers of fibrous tissues, or that same matrix within connective tissue ensheathing muscle cells or in the lacunae of bone. It is similarly the space occupied by the plasma of the circulation and the lymph fluid of the lymphatic channels. Delivery to the interstitial space of muscle tissue is preferred for the reasons discussed below. They may be conveniently delivered by injection into the tissues comprising these cells. They are preferably delivered to and expressed in persistent, non-dividing cells which are differentiated, although delivery and expression may be achieved in non-differentiated or less completely differentiated cells, such as, for example, stem cells of blood or skin fibroblasts. In vivo muscle cells are particularly competent in their ability to take up and express polynucleotides.

[1119] For the naked polynucleotide injection, an effective dosage amount of DNA or RNA will be in the range of from about 0.05 g/kg body weight to about 50 mg/kg body weight. Preferably the dosage will be from about 0.005 mg/kg to about 20 mg/kg and more preferably from about 0.05 mg/kg to about 5 mg/kg. Of course, as the artisan of ordinary skill will appreciate, this dosage will vary according to the tissue site of injection. The appropriate and effective dosage of nucleic acid sequence can readily be determined by those of ordinary skill in the art and may depend on the condition being treated and the route of administration. The preferred route of administration is by the parenteral route of injection into the interstitial space of tissues. However, other parenteral routes may also be used, such as, inhalation of an aerosol formulation particularly for delivery to lungs or bronchial tissues, throat or mucous membranes of the nose. In addition, naked polynucleotide constructs can be delivered to arteries during angioplasty by the catheter used in the procedure.

[1120] The dose response effects of injected polynucleotide in muscle in vivo is determined as follows. Suitable template DNA for production of mRNA coding for polypeptide of the present invention is prepared in accordance with a standard recombinant DNA methodology. The template DNA, which may be either circular or linear, is either used as naked DNA or complexed with liposomes. The quadriceps muscles of mice are then injected with various amounts of the template DNA.

[1121] Five to six week old female and male Balb/C mice are anesthetized by intraperitoneal injection with 0.3 ml of 2.5% Avertin. A 1.5 cm incision is made on the anterior thigh, and the quadriceps muscle is directly visualized. The template DNA is injected in 0.1 ml of carrier in a 1 cc syringe through a 27 gauge needle over one minute, approximately 0.5 cm from the distal insertion site of the muscle into the knee and about 0.2 cm deep. A suture is placed over the injection site for future localization, and the skin is closed with stainless steel clips.

[1122] After an appropriate incubation time (e.g., 7 days) muscle extracts are prepared by excising the entire quadriceps. Every fifth 15 um cross-section of the individual quadriceps muscles is histochemically stained for protein expression. A time course for protein expression may be done in a similar fashion except that quadriceps from different mice are harvested at different times. Persistence of DNA in muscle following injection may be determined by Southern blot analysis after preparing total cellular DNA and HIRT supernatants from injected and control mice. The results of the above experimentation in mice can be used to extrapolate proper dosages and other treatment parameters in humans and other animals using naked DNA.

### Example 19

[1123] Transgenic Animals

[1124] The polypeptides of the invention can also be expressed in transgenic animals. Animals of any species, including, but not limited to, mice, rats, rabbits, hamsters, guinea pigs, pigs, micro-pigs, goats, sheep, cows and non-human primates, e.g., baboons, monkeys, and chimpanzees may be used to generate transgenic animals. In a specific embodiment, techniques described herein or otherwise known in the art, are used to express polypeptides of the invention in humans, as part of a gene therapy protocol.

[1125] Any technique known in the art may be used to introduce the transgene (i.e., polynucleotides of the invention) into animals to produce the founder lines of transgenic animals. Such techniques include, but are not limited to, pronuclear microinjection (Paterson et al., Appl. Microbiol. Biotechnol. 40:691-698 (1994); Carver et al., Biotechnology (NY) 11:1263-1270 (1993); Wright et al., Biotechnology (NY) 9:830-834 (1991); and Hoppe et al., U.S. Pat. No. 4,873,191 (1989)); retrovirus mediated gene transfer into germ lines (Van der Putten et al., Proc. Natl. Acad. Sci., USA 82:6148-6152 (1985)), blastocysts or embryos; gene targeting in embryonic stem cells (Thompson et al., Cell 56:313-321 (1989)); electroporation of cells or embryos (Lo, 1983, Mol Cell. Biol. 3:1803-1814 (1983)); introduction of the polynucleotides of the invention using a gene gun (see, e.g., Ulmer et al., Science 259:1745 (1993); introducing nucleic acid constructs into embryonic pleuripotent stem cells and transferring the stem cells back into the blastocyst; and sperm-mediated gene transfer (Lavitrano et al., Cell 57:717-723 (1989); etc. For a review of such techniques, see Gordon, “Transgenic Animals,” Intl. Rev. Cytol. 115:171-229 (1989), which is incorporated by reference herein in its entirety.

[1126] Any technique known in the art may be used to produce transgenic clones containing polynucleotides of the invention, for example, nuclear transfer into enucleated oocytes of nuclei from cultured embryonic, fetal, or adult cells induced to quiescence (Campell et al., Nature 380:64-66 (1996); Wilmut et al., Nature 385:810-813 (1997)).

[1127] The present invention provides for transgenic animals that carry the transgene in all their cells, as well as animals which carry the transgene in some, but not all their cells, i.e., mosaic animals or chimeric. The transgene may be integrated as a single transgene or as multiple copies such as in concatamers, e.g., head-to-head tandems or head-to-tail tandems. The transgene may also be selectively introduced into and activated in a particular cell type by following, for example, the teaching of Lasko et al. (Lasko et al., Proc. Natl. Acad. Sci. USA 89:6232-6236 (1992)). The regulatory sequences required for such a cell-type specific activation will depend upon the particular cell type of interest, and will be apparent to those of skill in the art. When it is desired that the polynucleotide transgene be integrated into the chromosomal site of the endogenous gene, gene targeting is preferred. Briefly, when such a technique is to be utilized, vectors containing some nucleotide sequences homologous to the endogenous gene are designed for the purpose of integrating, via homologous recombination with chromosomal sequences, into and disrupting the function of the nucleotide sequence of the endogenous gene. The transgene may also be selectively introduced into a particular cell type, thus inactivating the endogenous gene in only that cell type, by following, for example, the teaching of Gu et al. (Gu et al., Science 265:103-106 (1994)). The regulatory sequences required for such a cell-type specific inactivation will depend upon the particular cell type of interest, and will be apparent to those of skill in the art.

[1128] Once transgenic animals have been generated, the expression of the recombinant gene may be assayed utilizing standard techniques. Initial screening may be accomplished by Southern blot analysis or PCR techniques to analyze animal tissues to verify that integration of the transgene has taken place. The level of mRNA expression of the transgene in the tissues of the transgenic animals may also be assessed using techniques which include, but are not limited to, Northern blot analysis of tissue samples obtained from the animal, in situ hybridization analysis, and reverse transcriptase-PCR (rt-PCR). Samples of transgenic gene-expressing tissue may also be evaluated immunocytochemically or immunohistochemically using antibodies specific for the transgene product.

[1129] Once the founder animals are produced, they may be bred, inbred, outbred, or crossbred to produce colonies of the particular animal. Examples of such breeding strategies include, but are not limited to: outbreeding of founder animals with more than one integration site in order to establish separate lines; inbreeding of separate lines in order to produce compound transgenics that express the transgene at higher levels because of the effects of additive expression of each transgene; crossing of heterozygous transgenic animals to produce animals homozygous for a given integration site in order to both augment expression and eliminate the need for screening of animals by DNA analysis; crossing of separate homozygous lines to produce compound heterozygous or homozygous lines; and breeding to place the transgene on a distinct background that is appropriate for an experimental model of interest.

[1130] Transgenic animals of the invention have uses which include, but are not limited to, animal model systems useful in elaborating the biological function of polypeptides of the present invention, studying conditions and/or disorders associated with aberrant expression, and in screening for compounds effective in ameliorating such conditions and/or disorders.

### Example 20

[1131] Knock-Out Animals

[1132] Endogenous gene expression can also be reduced by inactivating or “knocking out” the gene and/or its promoter using targeted homologous recombination. (See e.g., Smithies et al., Nature 317:230-234 (1985); Thomas & Capecchi, Cell 51:503-512 (1987); Thompson et al., Cell 5:313-321 (1989); each of which is incorporated by reference herein in its entirety.) For example, a mutant, non-functional polynucleotide of the invention (or a completely unrelated DNA sequence) flanked by DNA homologous to the endogenous polynucleotide sequence (either the coding regions or regulatory regions of the gene) can be used, with or without a selectable marker and/or a negative selectable marker, to transfect cells that express polypeptides of the invention in vivo. In another embodiment, techniques known in the art are used to generate knockouts in cells that contain, but do not express the gene of interest. Insertion of the DNA construct, via targeted homologous recombination, results in inactivation of the targeted gene. Such approaches are particularly suited in research and agricultural fields where modifications to embryonic stem cells can be used to generate animal offspring with an inactive targeted gene (e.g., see Thomas & Capecchi 1987 and Thompson 1989, supra). However this approach can be routinely adapted for use in humans provided the recombinant DNA constructs are directly administered or targeted to the required site in vivo using appropriate viral vectors that will be apparent to those of skill in the art.

[1133] In further embodiments of the invention, cells that are genetically engineered to express the polypeptides of the invention, or alternatively, that are genetically engineered not to express the polypeptides of the invention (e.g., knockouts) are administered to a patient in vivo. Such cells may be obtained from the patient (i.e., animal, including human) or an MHC compatible donor and can include, but are not limited to fibroblasts, bone marrow cells, blood cells (e.g., lymphocytes), adipocytes, muscle cells, endothelial cells etc. The cells are genetically engineered in vitro using recombinant DNA techniques to introduce the coding sequence of polypeptides of the invention into the cells, or alternatively, to disrupt the coding sequence and/or endogenous regulatory sequence associated with the polypeptides of the invention, e.g., by transduction (using viral vectors, and preferably vectors that integrate the transgene into the cell genome) or transfection procedures, including, but not limited to, the use of plasmids, cosmids, YACs, naked DNA, electroporation, liposomes, etc. The coding sequence of the polypeptides of the invention can be placed under the control of a strong constitutive or inducible promoter or promoter/enhancer to achieve expression, and preferably secretion, of the polypeptides of the invention. The engineered cells which express and preferably secrete the polypeptides of the invention can be introduced into the patient systemically, e.g., in the circulation, or intraperitoneally.

[1134] Alternatively, the cells can be incorporated into a matrix and implanted in the body, e.g., genetically engineered fibroblasts can be implanted as part of a skin graft; genetically engineered endothelial cells can be implanted as part of a lymphatic or vascular graft. (See, for example, Anderson et al. U.S. Pat. No. 5,399,349; and Mulligan & Wilson, U.S. Pat. No. 5,460,959 each of which is incorporated by reference herein in its entirety).

[1135] When the cells to be administered are non-autologous or non-MHC compatible cells, they can be administered using well known techniques which prevent the development of a host immune response against the introduced cells. For example, the cells may be introduced in an encapsulated form which, while allowing for an exchange of components with the immediate extracellular environment, does not allow the introduced cells to be recognized by the host immune system.

[1136] Transgenic and “knock-out” animals of the invention have uses which include, but are not limited to, animal model systems useful in elaborating the biological function of polypeptides of the present invention, studying conditions and/or disorders associated with aberrant expression, and in screening for compounds effective in ameliorating such conditions and/or disorders.

### Example 21

[1137] Assays Detecting Stimulation or Inhibition of B cell Proliferation and Differentiation

[1138] Generation of functional humoral immune responses requires both soluble and cognate signaling between B-lineage cells and their microenvironment. Signals may impart a positive stimulus that allows a B-lineage cell to continue its programmed development, or a negative stimulus that instructs the cell to arrest its current developmental pathway. To date, numerous stimulatory and inhibitory signals have been found to influence B cell responsiveness including IL-2, IL-4, IL-5, IL-6, IL-7, IL10, IL-13, IL-14 and IL-15. Interestingly, these signals are by themselves weak effectors but can, in combination with various co-stimulatory proteins, induce activation, proliferation, differentiation, homing, tolerance and death among B cell populations.

[1139] One of the best studied classes of B-cell co-stimulatory proteins is the TNF-superfamily. Within this family CD40, CD27, and CD30 along with their respective ligands CD154, CD70, and CD153 have been found to regulate a variety of immune responses. Assays which allow for the detection and/or observation of the proliferation and differentiation of these B-cell populations and their precursors are valuable tools in determining the effects various proteins may have on these B-cell populations in terms of proliferation and differentiation. Listed below are two assays designed to allow for the detection of the differentiation, proliferation, or inhibition of B-cell populations and their precursors.

[1140] In vitro Assay-Agonists or antagonists of the invention can be assessed for its ability to induce activation, proliferation, differentiation or inhibition and/or death in B-cell populations and their precursors. The activity of the agonists or antagonists of the invention on purified human tonsillar B cells, measured qualitatively over the dose range from 0.1 to 10,000 ng/mL, is assessed in a standard B-lymphocyte co-stimulation assay in which purified tonsillar B cells are cultured in the presence of either formalin-fixed Staphylococcus aureus Cowan I (SAC) or immobilized anti-human IgM antibody as the priming agent. Second signals such as IL-2 and IL-15 synergize with SAC and IgM crosslinking to elicit B cell proliferation as measured by tritiated-thymidine incorporation. Novel synergizing agents can be readily identified using this assay. The assay involves isolating human tonsillar B cells by magnetic bead (MACS) depletion of CD3-positive cells. The resulting cell population is greater than 95% B cells as assessed by expression of CD45R(B220).

[1141] Various dilutions of each sample are placed into individual wells of a 96-well plate to which are added 10⁵ B-cells suspended in culture medium (RPMI 1640 containing 10% FBS, 5×10⁻⁵M 2ME, 100 U/ml penicillin, 10 ug/ml streptomycin, and 10⁻⁵ dilution of SAC) in a total volume of 150 ul. Proliferation or inhibition is quantitated by a 20 h pulse (1uCi/well) with 3H-thymidine (6.7 Ci/mM) beginning 72 h post factor addition. The positive and negative controls are IL2 and medium respectively.

[1142] In vivo Assay—BALB/c mice are injected (i.p.) twice per day with buffer only, or 2 mg/Kg of agonists or antagonists of the invention, or truncated forms thereof. Mice receive this treatment for 4 consecutive days, at which time they are sacrificed and various tissues and serum collected for analyses. Comparison of H&E sections from normal spleens and spleens treated with agonists or antagonists of the invention identify the results of the activity of the agonists or antagonists on spleen cells, such as the diffusion of peri-arterial lymphatic sheaths, and/or significant increases in the nucleated cellularity of the red pulp regions, which may indicate the activation of the differentiation and proliferation of B-cell populations. Immunohistochemical studies using a B cell marker, anti-CD45R(B220), are used to determine whether any physiological changes to splenic cells, such as splenic disorganization, are due to increased B-cell representation within loosely defined B-cell zones that infiltrate established T-cell regions.

[1143] Flow cytometric analyses of the spleens from mice treated with agonist or antagonist is used to indicate whether the agonists or antagonists specifically increases the proportion of ThB+, CD45R(B220)dull B cells over that which is observed in control mice.

[1144] Likewise, a predicted consequence of increased mature B-cell representation in vivo is a relative increase in serum Ig titers. Accordingly, serum IgM and IgA levels are compared between buffer and agonists or antagonists-treated mice.

[1145] The studies described in this example tested activity of agonists or antagonists of the invention. However, one skilled in the art could easily modify the exemplified studies to test the activity of polynucleotides or polypeptides of the invention (e.g., gene therapy).

### Example 22

[1146] T Cell Proliferation Assay

[1147] A CD3-induced proliferation assay is performed on PBMCs and is measured by the uptake of ³H-thymidine. The assay is performed as follows. Ninety-six well plates are coated with 100 μl/well of mAb to CD3 (HIT3a, Pharmingen) or isotype-matched control mAb (B33.1) overnight at 4 degrees C. (1 μg/ml in 0.05M bicarbonate buffer, pH 9.5), then washed three times with PBS. PBMC are isolated by F/H gradient centrifugation from human peripheral blood and added to quadruplicate wells (5×10⁴/well) of mAb coated plates in RPMI containing 10% FCS and P/S in the presence of varying concentrations of agonists or antagonists of the invention (total volume 200 ul). Relevant protein buffer and medium alone are controls. After 48 hr. culture at 37 degrees C., plates are spun for 2 min. at 1000 rpm and 100 μl of supernatant is removed and stored −20 degrees C. for measurement of IL-2 (or other cytokines) if effect on proliferation is observed. Wells are supplemented with 100 ul of medium containing 0.5 uCi of ³H-thymidine and cultured at 37 degrees C. for 18-24 hr. Wells are harvested and incorporation of ³H-thymidine used as a measure of proliferation. Anti-CD3 alone is the positive control for proliferation. IL-2 (100 U/ml) is also used as a control which enhances proliferation. Control antibody which does not induce proliferation of T cells is used as the negative control for the effects of agonists or antagonists of the invention.

[1148] The studies described in this example tested activity of agonists or antagonists of the invention. However, one skilled in the art could easily modify the exemplified studies to test the activity of polynucleotides or polypeptides of the invention (e.g., gene therapy).

### Example 23

[1149] Effect of Agonists or Antagonists of the Invention on the Expression of MHC Class II, Costimulatory and Adhesion Molecules and Cell Differentiation of Monocytes and Monocyte-Derived Human Dendritic Cells

[1150] Dendritic cells are generated by the expansion of proliferating precursors found in the peripheral blood: adherent PBMC or elutriated monocytic fractions are cultured for 7-10 days with GM-CSF (50 ng/ml) and IL-4 (20 ng/ml). These dendritic cells have the characteristic phenotype of immature cells (expression of CD1, CD80, CD86, CD40 and MHC class II antigens). Treatment with activating factors, such as TNF-α, causes a rapid change in surface phenotype (increased expression of MHC class I and II, costimulatory and adhesion molecules, downregulation of FCγRII, upregulation of CD83). These changes correlate with increased antigen-presenting capacity and with functional maturation of the dendritic cells.

[1151] FACS analysis of surface antigens is performed as follows. Cells are treated 1-3 days with increasing concentrations of agonist or antagonist of the invention or LPS (positive control), washed with PBS containing 1% BSA and 0.02 mM sodium azide, and then incubated with 1:20 dilution of appropriate FITC- or PE-labeled monoclonal antibodies for 30 minutes at 4 degrees C. After an additional wash, the labeled cells are analyzed by flow cytometry on a FACScan (Becton Dickinson).

[1152] Effect on the production of cytokines. Cytokines generated by dendritic cells, in particular IL-12, are important in the initiation of T-cell dependent immune responses. IL-12 strongly influences the development of Thl helper T-cell immune response, and induces cytotoxic T and NK cell function. An ELISA is used to measure the IL-12 release as follows. Dendritic cells (10⁶/ml) are treated with increasing concentrations of agonists or antagonists of the invention for 24 hours. LPS (100 ng/ml) is added to the cell culture as positive control. Supernatants from the cell cultures are then collected and analyzed for IL-12 content using commercial ELISA kit (e.g., R & D Systems (Minneapolis, Minn.)). The standard protocols provided with the kits are used.

[1153] Effect on the expression of MHC Class II, costimulatory and adhesion molecules. Three major families of cell surface antigens can be identified on monocytes: adhesion molecules, molecules involved in antigen presentation, and Fc receptor. Modulation of the expression of MHC class II antigens and other costimulatory molecules, such as B7 and ICAM-1, may result in changes in the antigen presenting capacity of monocytes and ability to induce T cell activation. Increased expression of Fc receptors may correlate with improved monocyte cytotoxic activity, cytokine release and phagocytosis.

[1154] FACS analysis is used to examine the surface antigens as follows. Monocytes are treated 1-5 days with increasing concentrations of agonists or antagonists of the invention or LPS (positive control), washed with PBS containing 1% BSA and 0.02 mM sodium azide, and then incubated with 1:20 dilution of appropriate FITC- or PE-labeled monoclonal antibodies for 30 minutes at 4 degrees C. After an additional wash, the labeled cells are analyzed by flow cytometry on a FACScan (Becton Dickinson).

[1155] Monocyte activation and/or increased survival. Assays for molecules that activate (or alternatively, inactivate) monocytes and/or increase monocyte survival (or alternatively, decrease monocyte survival) are known in the art and may routinely be applied to determine whether a molecule of the invention functions as an inhibitor or activator of monocytes. Agonists or antagonists of the invention can be screened using the three assays described below. For each of these assays, Peripheral blood mononuclear cells (PBMC) are purified from single donor leukopacks (American Red Cross, Baltimore, Md.) by centrifugation through a Histopaque gradient (Sigma). Monocytes are isolated from PBMC by counterflow centrifugal elutriation.

[1156] Monocyte Survival Assay. Human peripheral blood monocytes progressively lose viability when cultured in absence of serum or other stimuli. Their death results from internally regulated processes (apoptosis). Addition to the culture of activating factors, such as TNF-alpha dramatically improves cell survival and prevents DNA fragmentation. Propidium iodide (PI) staining is used to measure apoptosis as follows. Monocytes are cultured for 48 hours in polypropylene tubes in serum-free medium (positive control), in the presence of 100 ng/ml TNF-alpha (negative control), and in the presence of varying concentrations of the compound to be tested. Cells are suspended at a concentration of 2×10⁶/ml in PBS containing PI at a final concentration of 5 μg/ml, and then incubated at room temperature for 5 minutes before FACScan analysis. PI uptake has been demonstrated to correlate with DNA fragmentation in this experimental paradigm.

[1157] Effect on cytokine release. An important function of monocytes/macrophages is their regulatory activity on other cellular populations of the immune system through the release of cytokines after stimulation. An ELISA to measure cytokine release is performed as follows. Human monocytes are incubated at a density of 5×10⁵ cells/ml with increasing concentrations of agonists or antagonists of the invention and under the same conditions, but in the absence of agonists or antagonists. For IL-12 production, the cells are primed overnight with IFN (100 U/ml) in the presence of agonist or antagonist of the invention. LPS (10 ng/ml) is then added. Conditioned media are collected after 24 h and kept frozen until use. Measurement of TNF-alpha, IL-10, MCP-1 and IL-8 is then performed using a commercially available ELISA kit (e.g., R & D Systems (Minneapolis, Minn.)) and applying the standard protocols provided with the kit.

[1158] Oxidative burst. Purified monocytes are plated in 96-w plate at 2-1×10⁵ cell/well. Increasing concentrations of agonists or antagonists of the invention are added to the wells in a total volume of 0.2 ml culture medium (RPMI 1640+10% FCS, glutamine and antibiotics). After 3 days incubation, the plates are centrifuged and the medium is removed from the wells. To the macrophage monolayers, 0.2 ml per well of phenol red solution (140 mM NaCl, 10 mM potassium phosphate buffer pH 7.0, 5.5 mM dextrose, 0.56 mM phenol red and 19 U/ml of HRPO) is added, together with the stimulant (200 nM PMA). The plates are incubated at 37° C. for 2 hours and the reaction is stopped by adding 20 μl 1N NaOH per well. The absorbance is read at 610 nm. To calculate the amount of H₂O₂ produced by the macrophages, a standard curve of a H₂O₂ solution of known molarity is performed for each experiment.

[1159] The studies described in this example tested activity of agonists or antagonists of the invention. However, one skilled in the art could easily modify the exemplified studies to test the activity of polynucleotides or polypeptides of the invention (e.g., gene therapy).

### Example 24

[1160] Biological Effects of Agonists or Antagonists of the Invention

[1161] Astrocyte and Neuronal Assays

[1162] Agonists or antagonists of the invention, expressed in Escherichia coli and purified as described above, can be tested for activity in promoting the survival, neurite outgrowth, or phenotypic differentiation of cortical neuronal cells and for inducing the proliferation of glial fibrillary acidic protein immunopositive cells, astrocytes. The selection of cortical cells for the bioassay is based on the prevalent expression of FGF-1 and FGF-2 in cortical structures and on the previously reported enhancement of cortical neuronal survival resulting from FGF-2 treatment. A thymidine incorporation assay, for example, can be used to elucidate an agonist or antagonist of the invention's activity on these cells.

[1163] Moreover, previous reports describing the biological effects of FGF-2 (basic FGF) on cortical or hippocampal neurons in vitro have demonstrated increases in both neuron survival and neurite outgrowth (Walicke et al., “Fibroblast growth factor promotes survival of dissociated hippocampal neurons and enhances neurite extension.” Proc. Natl. Acad. Sci. USA 83:3012-3016. (1986), assay herein incorporated by reference in its entirety). However, reports from experiments done on PC-12 cells suggest that these two responses are not necessarily synonymous and may depend on not only which FGF is being tested but also on which receptor(s) are expressed on the target cells. Using the primary cortical neuronal culture paradigm, the ability of an agonist or antagonist of the invention to induce neurite outgrowth can be compared to the response achieved with FGF-2 using, for example, a thymidine incorporation assay.

[1164] Fibroblast and Endothelial Cell Assays

[1165] Human lung fibroblasts are obtained from Clonetics (San Diego, Calif.) and maintained in growth media from Clonetics. Dermal microvascular endothelial cells are obtained from Cell Applications (San Diego, Calif.). For proliferation assays, the human lung fibroblasts and dermal microvascular endothelial cells can be cultured at 5,000 cells/well in a 96-well plate for one day in growth medium. The cells are then incubated for one day in 0.1% BSA basal medium. After replacing the medium with fresh 0.1% BSA medium, the cells are incubated with the test proteins for 3 days. Alamar Blue (Alamar Biosciences, Sacramento, Calif.) is added to each well to a final concentration of 10%. The cells are incubated for 4 hr. Cell viability is measured by reading in a CytoFluor fluorescence reader. For the PGE₂ assays, the human lung fibroblasts are cultured at 5,000 cells/well in a 96-well plate for one day. After a medium change to 0.1% BSA basal medium, the cells are incubated with FGF-2 or agonists or antagonists of the invention with or without IL-1α for 24 hours. The supernatants are collected and assayed for PGE2 by EIA kit (Cayman, Ann Arbor, Mich.). For the IL-6 assays, the human lung fibroblasts are cultured at 5,000 cells/well in a 96-well plate for one day. After a medium change to 0.1% BSA basal medium, the cells are incubated with FGF-2 or with or without agonists or antagonists of the invention IL-1α for 24 hours. The supernatants are collected and assayed for IL-6 by ELISA kit (Endogen, Cambridge, Mass.).

[1166] Human lung fibroblasts are cultured with FGF-2 or agonists or antagonists of the invention for 3 days in basal medium before the addition of Alamar Blue to assess effects on growth of the fibroblasts. FGF-2 should show a stimulation at 10-2500 ng/ml which can be used to compare stimulation with agonists or antagonists of the invention.

[1167] Parkinson Models

[1168] The loss of motor function in Parkinson's disease is attributed to a deficiency of striatal dopamine resulting from the degeneration of the nigrostriatal dopaminergic projection neurons. An animal model for Parkinson's that has been extensively characterized involves the systemic administration of 1-methyl-4 phenyl 1,2,3,6-tetrahydropyridine (MPTP). In the CNS, MPTP is taken-up by astrocytes and catabolized by monoamine oxidase B to 1-methyl-4-phenyl pyridine (MPP⁺) and released. Subsequently, MPP⁺ is actively accumulated in dopaminergic neurons by the high-affinity reuptake transporter for dopamine. MPP⁺ is then concentrated in mitochondria by the electrochemical gradient and selectively inhibits nicotidamide adenine disphosphate: ubiquinone oxidoreductionase (complex I), thereby interfering with electron transport and eventually generating oxygen radicals.

[1169] It has been demonstrated in tissue culture paradigms that FGF-2 (basic FGF) has trophic activity towards nigral dopaminergic neurons (Ferrari et al., Dev. Biol. 1989). Recently, Dr. Unsicker's group has demonstrated that administering FGF-2 in gel foam implants in the striatum results in the near complete protection of nigral dopaminergic neurons from the toxicity associated with MPTP exposure (Otto and Unsicker, J. Neuroscience, 1990).

[1170] Based on the data with FGF-2, agonists or antagonists of the invention can be evaluated to determine whether it has an action similar to that of FGF-2 in enhancing dopaminergic neuronal survival in vitro and it can also be tested in vivo for protection of dopaminergic neurons in the striatum from the damage associated with MPTP treatment. The potential effect of an agonist or antagonist of the invention is first examined in vitro in a dopaminergic neuronal cell culture paradigm. The cultures are prepared by dissecting the midbrain floor plate from gestation day 14 Wistar rat embryos. The tissue is dissociated with trypsin and seeded at a density of 200,000 cells/cm² on polyorthinine-laminin coated glass coverslips. The cells are maintained in Dulbecco's Modified Eagle's medium and F12 medium containing hormonal supplements (N1). The cultures are fixed with paraformaldehyde after 8 days in vitro and are processed for tyrosine hydroxylase, a specific marker for dopaminergic neurons, immunohistochemical staining. Dissociated cell cultures are prepared from embryonic rats. The culture medium is changed every third day and the factors are also added at that time.

[1171] Since the dopaminergic neurons are isolated from animals at gestation day 14, a developmental time which is past the stage when the dopaminergic precursor cells are proliferating, an increase in the number of tyrosine hydroxylase immunopositive neurons would represent an increase in the number of dopaminergic neurons surviving in vitro. Therefore, if an agonist or antagonist of the invention acts to prolong the survival of dopaminergic neurons, it would suggest that the agonist or antagonist may be involved in Parkinson's Disease.

[1172] The studies described in this example tested activity of agonists or antagonists of the invention. However, one skilled in the art could easily modify the exemplified studies to test the activity of polynucleotides or polypeptides of the invention (e.g., gene therapy).

### Example 25

[1173] The Effect of Agonists or Antagonists of the Invention on the Growth of Vascular Endothelial Cells

[1174] On day 1, human umbilical vein endothelial cells (HUVEC) are seeded at 2-5×10⁴ cells/35 mm dish density in M199 medium containing 4% fetal bovine serum (FBS), 16 units/ml heparin, and 50 units/ml endothelial cell growth supplements (ECGS, Biotechnique, Inc.). On day 2, the medium is replaced with M199 containing 10% FBS, 8 units/ml heparin. An agonist or antagonist of the invention, and positive controls, such as VEGF and basic FGF (bFGF) are added, at varying concentrations. On days 4 and 6, the medium is replaced. On day 8, cell number is determined with a Coulter Counter.

[1175] An increase in the number of HUVEC cells indicates that the compound of the invention may proliferate vascular endothelial cells, while a decrease in the number of HUVEC cells indicates that the compound of the invention inhibits vascular endothelial cells.

[1176] The studies described in this example tested activity of a polypeptide of the invention. However, one skilled in the art could easily modify the exemplified studies to test the activity of polynucleotides (e.g., gene therapy), agonists, and/or antagonists of the invention.

### Example 26

[1177] Rat Corneal Wound Healing Model

[1178] This animal model shows the effect of an agonist or antagonist of the invention on neovascularization. The experimental protocol includes:

[1179] Making a 1-1.5 mm long incision from the center of cornea into the stromal layer.

[1180] Inserting a spatula below the lip of the incision facing the outer corner of the eye.

[1181] Making a pocket (its base is 1-1.5 mm form the edge of the eye).

[1182] Positioning a pellet, containing 50 ng-5 ug of an agonist or antagonist of the invention, within the pocket.

[1183] Treatment with an agonist or antagonist of the invention can also be applied topically to the corneal wounds in a dosage range of 20 mg-500 mg (daily treatment for five days).

[1184] The studies described in this example tested activity of agonists or antagonists of the invention. However, one skilled in the art could easily modify the exemplified studies to test the activity of polynucleotides or polypeptides of the invention (e.g., gene therapy).

### Example 27

[1185] Diabetic Mouse and Glucocorticoid-Impaired Wound Healing Models

[1186] Diabetic db+/db+ Mouse Model

[1187] To demonstrate that an agonist or antagonist of the invention accelerates the healing process, the genetically diabetic mouse model of wound healing is used. The full thickness wound healing model in the db+/db+ mouse is a well characterized, clinically relevant and reproducible model of impaired wound healing. Healing of the diabetic wound is dependent on formation of granulation tissue and re-epithelialization rather than contraction (Gartner, M. H. et al., J. Surg. Res. 52:389 (1992); Greenhalgh, D. G. et al., Am. J. Pathol. 136:1235 (1990)).

[1188] The diabetic animals have many of the characteristic features observed in Type II diabetes mellitus. Homozygous (db+/db+) mice are obese in comparison to their normal heterozygous (db+/+m) littermates. Mutant diabetic (db+/db+) mice have a single autosomal recessive mutation on chromosome 4 (db+) (Coleman et al. Proc. Natl. Acad. Sci. USA 77:283-293 (1982)). Animals show polyphagia, polydipsia and polyuria. Mutant diabetic mice (db+/db+) have elevated blood glucose, increased or normal insulin levels, and suppressed cell-mediated immunity (Mandel et al., J. Immunol. 120:1375 (1978); Debray-Sachs, M. et al., Clin. Exp. Immunol. 51(1):1-7 (1983); Leiter et al., Am. J. of Pathol. 114:46-55 (1985)). Peripheral neuropathy, myocardial complications, and microvascular lesions, basement membrane thickening and glomerular filtration abnormalities have been described in these animals (Norido, F. et al., Exp. Neurol. 83(2):221-232 (1984); Robertson et al., Diabetes 29(1):60-67 (1980); Giacomelli et al., Lab Invest. 40(4):460-473 (1979); Coleman, D. L., Diabetes 31 (Suppl):1-6 (1982)). These homozygous diabetic mice develop hyperglycemia that is resistant to insulin analogous to human type II diabetes (Mandel et al, J. Immunol. 120:1375-1377 (1978)).

[1189] The characteristics observed in these animals suggests that healing in this model may be similar to the healing observed in human diabetes (Greenhalgh, et al., Am. J. of Pathol. 136:1235-1246 (1990)).

[1190] Genetically diabetic female C57BL/KsJ (db+/db+) mice and their non-diabetic (db+/+m) heterozygous littermates are used in this study (Jackson Laboratories). The animals are purchased at 6 weeks of age and are 8 weeks old at the beginning of the study. Animals are individually housed and received food and water ad libitum. All manipulations are performed using aseptic techniques. The experiments are conducted according to the rules and guidelines of Human Genome Sciences, Inc. Institutional Animal Care and Use Committee and the Guidelines for the Care and Use of Laboratory Animals.

[1191] Wounding protocol is performed according to previously reported methods (Tsuboi, R. and Rifkin, D. B., J. Exp. Med. 172:245-251 (1990)). Briefly, on the day of wounding, animals are anesthetized with an intraperitoneal injection of Avertin (0.01 mg/mL), 2,2,2-tribromoethanol and 2-methyl-2-butanol dissolved in deionized water. The dorsal region of the animal is shaved and the skin washed with 70% ethanol solution and iodine. The surgical area is dried with sterile gauze prior to wounding. An 8 mm full-thickness wound is then created using a Keyes tissue punch. Immediately following wounding, the surrounding skin is gently stretched to eliminate wound expansion. The wounds are left open for the duration of the experiment. Application of the treatment is given topically for 5 consecutive days commencing on the day of wounding. Prior to treatment, wounds are gently cleansed with sterile saline and gauze sponges.

[1192] Wounds are visually examined and photographed at a fixed distance at the day of surgery and at two day intervals thereafter. Wound closure is determined by daily measurement on days 1-5 and on day 8. Wounds are measured horizontally and vertically using a calibrated Jameson caliper. Wounds are considered healed if granulation tissue is no longer visible and the wound is covered by a continuous epithelium.

[1193] An agonist or antagonist of the invention is administered using at a range different doses, from 4 mg to 500 mg per wound per day for 8 days in vehicle. Vehicle control groups received 50 mL of vehicle solution.

[1194] Animals are euthanized on day 8 with an intraperitoneal injection of sodium pentobarbital (300 mg/kg). The wounds and surrounding skin are then harvested for histology and immunohistochemistry. Tissue specimens are placed in 10% neutral buffered formalin in tissue cassettes between biopsy sponges for further processing.

[1195] Three groups of 10 animals each (5 diabetic and 5 non-diabetic controls) are evaluated: 1) Vehicle placebo control, 2) untreated group, and 3) treated group.

[1196] Wound closure is analyzed by measuring the area in the vertical and horizontal axis and obtaining the total square area of the wound. Contraction is then estimated by establishing the differences between the initial wound area (day 0) and that of post treatment (day 8). The wound area on day 1 is 64 mm², the corresponding size of the dermal punch. Calculations are made using the following formula:

[Open area on day 8]−[Open area on day 1]/[Open area on day 1]

[1197] Specimens are fixed in 10% buffered formalin and paraffin embedded blocks are sectioned perpendicular to the wound surface (5mm) and cut using a Reichert-Jung microtome. Routine hematoxylin-eosin (H&E) staining is performed on cross-sections of bisected wounds. Histologic examination of the wounds are used to assess whether the healing process and the morphologic appearance of the repaired skin is altered by treatment with an agonist or antagonist of the invention. This assessment included verification of the presence of cell accumulation, inflammatory cells, capillaries, fibroblasts, re-epithelialization and epidermal maturity (Greenhalgh, D. G. et al., Am. J. Pathol. 136:1235 (1990)). A calibrated lens micrometer is used by a blinded observer.

[1198] Tissue sections are also stained immunohistochemically with a polyclonal rabbit anti-human keratin antibody using ABC Elite detection system. Human skin is used as a positive tissue control while non-immune IgG is used as a negative control. Keratinocyte growth is determined by evaluating the extent of reepithelialization of the wound using a calibrated lens micrometer.

[1199] Proliferating cell nuclear antigen/cyclin (PCNA) in skin specimens is demonstrated by using anti-PCNA antibody (1:50) with an ABC Elite detection system. Human colon cancer served as a positive tissue control and human brain tissue is used as a negative tissue control. Each specimen included a section with omission of the primary antibody and substitution with non-immune mouse IgG. Ranking of these sections is based on the extent of proliferation on a scale of 0-8, the lower side of the scale reflecting slight proliferation to the higher side reflecting intense proliferation.

[1200] Experimental data are analyzed using an unpaired t test. A p value of <0.05 is considered significant.

[1201] Steroid Impaired Rat Model

[1202] The inhibition of wound healing by steroids has been well documented in various in vitro and in vivo systems (Wahl, Glucocorticoids and Wound healing. In: Anti-Inflammatory Steroid Action: Basic and Clinical Aspects. 280-302 (1989); Wahlet al., J. Immunol. 115: 476-481 (1975); Werb et al., J. Exp. Med. 147:1684-1694 (1978)). Glucocorticoids retard wound healing by inhibiting angiogenesis, decreasing vascular permeability (Ebert et al., An. Intern. Med. 37:701-705 (1952)), fibroblast proliferation, and collagen synthesis (Beck et al., Growth Factors. 5: 295-304 (1991); Haynes et al., J. Clin. Invest. 61: 703-797 (1978)) and producing a transient reduction of circulating monocytes (Haynes et al., J. Clin. Invest. 61: 703-797 (1978); Wahl, “Glucocorticoids and wound healing”, In: Antiinflammatory Steroid Action: Basic and Clinical Aspects, Academic Press, New York, pp. 280-302 (1989)). The systemic administration of steroids to impaired wound healing is a well establish phenomenon in rats (Beck et al., Growth Factors. 5: 295-304 (1991); Haynes et al., J. Clin. Invest. 61: 703-797 (1978); Wahl, “Glucocorticoids and wound healing”, In: Antiinflammatory Steroid Action: Basic and Clinical Aspects, Academic Press, New York, pp. 280-302 (1989); Pierce et al, Proc. Natl. Acad. Sci. USA 86: 2229-2233 (1989)).

[1203] To demonstrate that an agonist or antagonist of the invention can accelerate the healing process, the effects of multiple topical applications of the agonist or antagonist on full thickness excisional skin wounds in rats in which healing has been impaired by the systemic administration of methylprednisolone is assessed.

[1204] Young adult male Sprague Dawley rats weighing 250-300 g (Charles River Laboratories) are used in this example. The animals are purchased at 8 weeks of age and are 9 weeks old at the beginning of the study. The healing response of rats is impaired by the systemic administration of methylprednisolone (17 mg/kg/rat intramuscularly) at the time of wounding. Animals are individually housed and received food and water ad libitum. All manipulations are performed using aseptic techniques. This study is conducted according to the rules and guidelines of Human Genome Sciences, Inc. Institutional Animal Care and Use Committee and the Guidelines for the Care and Use of Laboratory Animals.

[1205] The wounding protocol is followed according to section A, above. On the day of wounding, animals are anesthetized with an intramuscular injection of ketamine (50 mg/kg) and xylazine (5 mg/kg). The dorsal region of the animal is shaved and the skin washed with 70% ethanol and iodine solutions. The surgical area is dried with sterile gauze prior to wounding. An 8 mm full-thickness wound is created using a Keyes tissue punch. The wounds are left open for the duration of the experiment. Applications of the testing materials are given topically once a day for 7 consecutive days commencing on the day of wounding and subsequent to methylprednisolone administration. Prior to treatment, wounds are gently cleansed with sterile saline and gauze sponges.

[1206] Wounds are visually examined and photographed at a fixed distance at the day of wounding and at the end of treatment. Wound closure is determined by daily measurement on days 1-5 and on day 8. Wounds are measured horizontally and vertically using a calibrated Jameson caliper. Wounds are considered healed if granulation tissue is no longer visible and the wound is covered by a continuous epithelium.

[1207] The agonist or antagonist of the invention is administered using at a range different doses, from 4 mg to 500 mg per wound per day for 8 days in vehicle. Vehicle control groups received 50 mL of vehicle solution.

[1208] Animals are euthanized on day 8 with an intraperitoneal injection of sodium pentobarbital (300 mg/kg). The wounds and surrounding skin are then harvested for histology. Tissue specimens are placed in 10% neutral buffered formalin in tissue cassettes between biopsy sponges for further processing.

[1209] Three groups of 10 animals each (5 with methylprednisolone and 5 without glucocorticoid) are evaluated: 1) Untreated group 2) Vehicle placebo control 3) treated groups.

[1210] Wound closure is analyzed by measuring the area in the vertical and horizontal axis and obtaining the total area of the wound. Closure is then estimated by establishing the differences between the initial wound area (day 0) and that of post treatment (day 8). The wound area on day 1 is 64 mm², the corresponding size of the dermal punch. Calculations are made using the following formula:

[Open area on day 8]−[Open area on day 1]/[Open area on day 1]

[1211] Specimens are fixed in 10% buffered formalin and paraffin embedded blocks are sectioned perpendicular to the wound surface (5 mm) and cut using an Olympus microtome. Routine hematoxylin-eosin (H&E) staining is performed on cross-sections of bisected wounds. Histologic examination of the wounds allows assessment of whether the healing process and the morphologic appearance of the repaired skin is improved by treatment with an agonist or antagonist of the invention. A calibrated lens micrometer is used by a blinded observer to determine the distance of the wound gap.

[1212] Experimental data are analyzed using an unpaired t test. A p value of <0.05 is considered significant.

[1213] The studies described in this example tested activity of agonists or antagonists of the invention. However, one skilled in the art could easily modify the exemplified studies to test the activity of polynucleotides or polypeptides of the invention (e.g., gene therapy).

### Example 28

[1214] Lymphadema Animal Model

[1215] The purpose of this experimental approach is to create an appropriate and consistent lymphedema model for testing the therapeutic effects of an agonist or antagonist of the invention in lymphangiogenesis and re-establishment of the lymphatic circulatory system in the rat hind limb. Effectiveness is measured by swelling volume of the affected limb, quantification of the amount of lymphatic vasculature, total blood plasma protein, and histopathology. Acute lymphedema is observed for 7-10 days. Perhaps more importantly, the chronic progress of the edema is followed for up to 3-4 weeks.

[1216] Prior to beginning surgery, blood sample is drawn for protein concentration analysis. Male rats weighing approximately ˜350 g are dosed with Pentobarbital. Subsequently, the right legs are shaved from knee to hip. The shaved area is swabbed with gauze soaked in 70% EtOH. Blood is drawn for serum total protein testing. Circumference and volumetric measurements are made prior to injecting dye into paws after marking 2 measurement levels (0.5 cm above heel, at mid-pt of dorsal paw). The intradermal dorsum of both right and left paws are injected with 0.05 ml of 1% Evan's Blue. Circumference and volumetric measurements are then made following injection of dye into paws.

[1217] Using the knee joint as a landmark, a mid-leg inguinal incision is made circumferentially allowing the femoral vessels to be located. Forceps and hemostats are used to dissect and separate the skin flaps. After locating the femoral vessels, the lymphatic vessel that runs along side and underneath the vessel(s) is located. The main lymphatic vessels in this area are then electrically coagulated or suture ligated.

[1218] Using a microscope, muscles in back of the leg (near the semitendinosis and adductors) are bluntly dissected. The popliteal lymph node is then located. The 2 proximal and 2 distal lymphatic vessels and distal blood supply of the popliteal node are then ligated by suturing. The popliteal lymph node, and any accompanying adipose tissue, is then removed by cutting connective tissues.

[1219] Care is taken to control any mild bleeding resulting from this procedure. After lymphatics are occluded, the skin flaps are sealed by using liquid skin (Vetbond) (AJ Buck). The separated skin edges are sealed to the underlying muscle tissue while leaving a gap of ˜0.5 cm around the leg. Skin also may be anchored by suturing to underlying muscle when necessary.

[1220] To avoid infection, animals are housed individually with mesh (no bedding). Recovering animals are checked daily through the optimal edematous peak, which typically occurred by day 5-7. The plateau edematous peak are then observed. To evaluate the intensity of the lymphedema, the circumference and volumes of 2 designated places on each paw before operation and daily for 7 days are measured. The effect of plasma proteins on lymphedema is determined and whether protein analysis is a useful testing perimeter is also investigated. The weights of both control and edematous limbs are evaluated at 2 places. Analysis is performed in a blind manner.

[1221] Circumference Measurements: Under brief gas anesthetic to prevent limb movement, a cloth tape is used to measure limb circumference. Measurements are done at the ankle bone and dorsal paw by 2 different people and those 2 readings are averaged. Readings are taken from both control and edematous limbs.

[1222] Volumetric Measurements: On the day of surgery, animals are anesthetized with Pentobarbital and are tested prior to surgery. For daily volumetrics animals are under brief halothane anesthetic (rapid immobilization and quick recovery), and both legs are shaved and equally marked using waterproof marker on legs. Legs are first dipped in water, then dipped into instrument to each marked level, then measured by Buxco edema software(Chen/Victor). Data is recorded by one person, while the other is dipping the limb to marked area.

[1223] Blood-plasma protein measurements: Blood is drawn, spun, and serum separated prior to surgery and then at conclusion for total protein and Ca2⁺ comparison.

[1224] Limb Weight Comparison: After drawing blood, the animal is prepared for tissue collection. The limbs are amputated using a quillitine, then both experimental and control legs are cut at the ligature and weighed. A second weighing is done as the tibio-cacaneal joint is disarticulated and the foot is weighed.

[1225] Histological Preparations: The transverse muscle located behind the knee (popliteal) area is dissected and arranged in a metal mold, filled with freezeGel, dipped into cold methylbutane, placed into labeled sample bags at −80EC until sectioning. Upon sectioning, the muscle is observed under fluorescent microscopy for lymphatics.

[1226] The studies described in this example tested activity of agonists or antagonists of the invention. However, one skilled in the art could easily modify the exemplified studies to test the activity of polynucleotides or polypeptides of the invention (e.g., gene therapy).

### Example 29

[1227] Suppression of TNF alpha-induced adhesion molecule expression by a Agonist or Antagonist of the Invention

[1228] The recruitment of lymphocytes to areas of inflammation and angiogenesis involves specific receptor-ligand interactions between cell surface adhesion molecules (CAMs) on lymphocytes and the vascular endothelium. The adhesion process, in both normal and pathological settings, follows a multi-step cascade that involves intercellular adhesion molecule-1 (ICAM-1), vascular cell adhesion molecule-1 (VCAM-1), and endothelial leukocyte adhesion molecule-1 (E-selectin) expression on endothelial cells (EC). The expression of these molecules and others on the vascular endothelium determines the efficiency with which leukocytes may adhere to the local vasculature and extravasate into the local tissue during the development of an inflammatory response. The local concentration of cytokines and growth factor participate in the modulation of the expression of these CAMs.

[1229] Tumor necrosis factor alpha (TNF-a), a potent proinflammatory cytokine, is a stimulator of all three CAMs on endothelial cells and may be involved in a wide variety of inflammatory responses, often resulting in a pathological outcome.

[1230] The potential of an agonist or antagonist of the invention to mediate a suppression of TNF-a induced CAM expression can be examined. A modified ELISA assay which uses ECs as a solid phase absorbent is employed to measure the amount of CAM expression on TNF-a treated ECs when co-stimulated with a member of the FGF family of proteins.

[1231] To perform the experiment, human umbilical vein endothelial cell (HUVEC) cultures are obtained from pooled cord harvests and maintained in growth medium (EGM-2; Clonetics, San Diego, Calif.) supplemented with 10% FCS and 1% penicillin/streptomycin in a 37 degree C. humidified incubator containing 5% CO₂. HUVECs are seeded in 96-well plates at concentrations of 1×10⁴ cells/well in EGM medium at 37 degree C. for 18-24 hrs or until confluent. The monolayers are subsequently washed 3 times with a serum-free solution of RPMI-1640 supplemented with 100 U/ml penicillin and 100 mg/ml streptomycin, and treated with a given cytokine and/or growth factor(s) for 24 h at 37 degree C. Following incubation, the cells are then evaluated for CAM expression.

[1232] Human Umbilical Vein Endothelial cells (HUVECs) are grown in a standard 96 well plate to confluence. Growth medium is removed from the cells and replaced with 90 ul of 199 Medium (10% FBS). Samples for testing and positive or negative controls are added to the plate in triplicate (in 10 ul volumes). Plates are incubated at 37 degree C. for either 5 h (selectin and integrin expression) or 24 h (integrin expression only). Plates are aspirated to remove medium and 100 μl of 0.1% paraformaldehyde-PBS(with Ca++ and Mg++) is added to each well. Plates are held at 4° C. for 30 min.

[1233] Fixative is then removed from the wells and wells are washed 1× with PBS(+Ca,Mg)+0.5% BSA and drained. Do not allow the wells to dry. Add 10 μl of diluted primary antibody to the test and control wells. Anti-ICAM-1-Biotin, Anti-VCAM-1-Biotin and Anti-E-selectin-Biotin are used at a concentration of 10 μg/ml (1:10 dilution of 0.1 mg/ml stock antibody). Cells are incubated at 37° C. for 30 min. in a humidified environment. Wells are washed ×3 with PBS(+Ca,Mg)+0.5% BSA.

[1234] Then add 20 μl of diluted ExtrAvidin-Alkaline Phosphotase (1:5,000 dilution) to each well and incubated at 37° C. for 30 min. Wells are washed ×3 with PBS(+Ca,Mg)+0.5% BSA. 1 tablet of p-Nitrophenol Phosphate pNPP is dissolved in 5 ml of glycine buffer (pH 10.4). 100 μl of pNPP substrate in glycine buffer is added to each test well. Standard wells in triplicate are prepared from the working dilution of the ExtrAvidin-Alkaline Phosphotase in glycine buffer: 1:5,000 (10⁰)>10^{-0.5}>10⁻¹>10^{-1.5} 0.5 μl of each dilution is added to triplicate wells and the resulting AP content in each well is 5.50 ng, to 1.74 ng, 0.55 ng, 0.18 ng. 100 μl of pNNP reagent must then be added to each of the standard wells. The plate must be incubated at 37° C. for to 4h . A volume of 50 μl of 3M NaOH is added to all wells. The results are quantified on a plate reader at 405 nm. The background subtraction option is used on blank wells filled with glycine buffer only. The template is set up to indicate the concentration of AP-conjugate in each standard well [5.50 ng; 1.74 ng; 0.55 ng; 0.18 ng]. Results are indicated as amount of bound AP-conjugate in each sample.

[1235] The studies described in this example tested activity of agonists or antagonists of the invention. However, one skilled in the art could easily modify the exemplified studies to test the activity of polynucleotides or polypeptides of the invention (e.g., gene therapy).

### Example 30

[1236] Production Of Polypeptide of the Invention For High-Throughput Screening Assays

[1237] The following protocol produces a supernatant containing polypeptide of the present invention to be tested. This supernatant can then be used in the Screening Assays described in Examples 32-41.

[1238] First, dilute Poly-D-Lysine (644 587 Boehringer-Mannheim) stock solution (1 mg/ml in PBS) 1:20 in PBS (w/o calcium or magnesium 17-516F Biowhittaker) for a working solution of 50 ug/ml. Add 200 ul of this solution to each well (24 well plates) and incubate at RT for 20 minutes. Be sure to distribute the solution over each well (note: a 12-channel pipetter may be used with tips on every other channel). Aspirate off the Poly-D-Lysine solution and rinse with 1 ml PBS (Phosphate Buffered Saline). The PBS should remain in the well until just prior to plating the cells and plates may be polylysine coated in advance for up to two weeks.

[1239] Plate 293T cells (do not carry cells past P+20) at 2×10⁵ cells/well in 0.5 ml DMEM(Dulbecco's Modified Eagle Medium)(with 4.5 G/L glucose and L-glutamine (12-604F Biowhittaker))/10% heat inactivated FBS(14-503F Biowhittaker)/1×Penstrep(17-602E Biowhittaker). Let the cells grow overnight.

[1240] The next day, mix together in a sterile solution basin: 300 ul Lipofectamine (18324-012 Gibco/BRL) and 5 ml Optimem 1 (31985070 Gibco/BRL)/96-well plate. With a small volume multi-channel pipetter, aliquot approximately 2 ug of an expression vector containing a polynucleotide insert, produced by the methods described in Examples 8-10, into an appropriately labeled 96-well round bottom plate. With a multi-channel pipetter, add 50 ul of the Lipofectamine/Optimem I mixture to each well. Pipette up and down gently to mix. Incubate at RT 15-45 minutes. After about 20 minutes, use a multi-channel pipetter to add 150 ul Optimem I to each well. As a control, one plate of vector DNA lacking an insert should be transfected with each set of transfections.

[1241] Preferably, the transfection should be performed by tag-teaming the following tasks. By tag-teaming, hands on time is cut in half, and the cells do not spend too much time on PBS. First, person A aspirates off the media from four 24-well plates of cells, and then person B rinses each well with 0.5-1 ml PBS. Person A then aspirates off PBS rinse, and person B, using a 12-channel pipetter with tips on every other channel, adds the 200 ul of DNA/Lipofectamine/Optimem I complex to the odd wells first, then to the even wells, to each row on the 24-well plates. Incubate at 37 degree C. for 6 hours.

[1242] While cells are incubating, prepare appropriate media, either 1%BSA in DMEM with 1× penstrep, or HGS CHO-5 media (116.6 mg/L of CaCl2 (anhyd); 0.00130 mg/L CuSO₄—5H₂O; 0.050 mg/L of Fe(NO₃)₃—9H₂O; 0.417 mg/L of FeSO₄—7H₂O; 311.80 mg/L of Kcl; 28.64 mg/L of MgCl₂; 48.84 mg/L of MgSO₄; 6995.50 mg/L of NaCl; 2400.0 mg/L of NaHCO₃; 62.50 mg/L of NaH₂PO₄—H₂O; 71.02 mg/L of Na₂HPO4; 0.4320 mg/L of ZnSO₄—7H₂O; 0.002 mg/L of Arachidonic Acid; 1.022 mg/L of Cholesterol; 0.070 mg/L of DL-alpha-Tocopherol-Acetate; 0.0520 mg/L of Linoleic Acid; 0.010 mg/L of Linolenic Acid; 0.010 mg/L of Myristic Acid; 0.010 mg/L of Oleic Acid; 0.010 mg/L of Palmitric Acid; 0.010 mg/L of Palmitic Acid; 100 mg/L of Pluronic F-68; 0.010 mg/L of Stearic Acid; 2.20 mg/L of Tween 80; 4551 mg/L of D-Glucose; 130.85 mg/ml of L-Alanine; 147.50 mg/ml of L-Arginine-HCL; 7.50 mg/ml of L-Asparagine-H₂O; 6.65 mg/ml of L-Aspartic Acid; 29.56 mg/ml of L-Cystine-2HCL-H₂O; 31.29 mg/ml of L-Cystine-2HCL; 7.35 mg/ml of L-Glutamic Acid; 365.0 mg/ml of L-Glutamine; 18.75 mg/ml of Glycine; 52.48 mg/ml of L-Histidine-HCL-H₂O; 106.97 mg/ml of L-Isoleucine; 111.45 mg/ml of L-Leucine; 163.75 mg/ml of L-Lysine HCL; 32.34 mg/ml of L-Methionine; 68.48 mg/ml of L-Phenylalainine; 40.0 mg/ml of L-Proline; 26.25 mg/ml of L-Serine; 101.05 mg/ml of L-Threonine; 19.22 mg/ml of L-Tryptophan; 91.79 mg/ml of L-Tryrosine-2Na—2H₂O; and 99.65 mg/ml of L-Valine; 0.0035 mg/L of Biotin; 3.24 mg/L of D-Ca Pantothenate; 11.78 mg/L of Choline Chloride; 4.65 mg/L of Folic Acid; 15.60 mg/L of i-Inositol; 3.02 mg/L of Niacinamide; 3.00 mg/L of Pyridoxal HCL; 0.031 mg/L of Pyridoxine HCL; 0.319 mg/L of Riboflavin; 3.17 mg/L of Thiamine HCL; 0.365 mg/L of Thymidine; 0.680 mg/L of Vitamin B₁₂; 25 mM of HEPES Buffer; 2.39 mg/L of Na Hypoxanthine; 0.105 mg/L of Lipoic Acid; 0.081 mg/L of Sodium Putrescine-2HCL; 55.0 mg/L of Sodium Pyruvate; 0.0067 mg/L of Sodium Selenite; 20 uM of Ethanolamine; 0.122 mg/L of Ferric Citrate; 41.70 mg/L of Methyl-B-Cyclodextrin complexed with Linoleic Acid; 33.33 mg/L of Methyl-B-Cyclodextrin complexed with Oleic Acid; 10 mg/L of Methyl-B-Cyclodextrin complexed with Retinal Acetate. Adjust osmolarity to 327 mOsm) with 2 mm glutamine and 1× penstrep. (BSA (81-068-3 Bayer) 100 gm dissolved in 1 L DMEM for a 10% BSA stock solution). Filter the media and collect 50 ul for endotoxin assay in 15 ml polystyrene conical.

[1243] The transfection reaction is terminated, preferably by tag-teaming, at the end of the incubation period. Person A aspirates off the transfection media, while person B adds 1.5 ml appropriate media to each well. Incubate at 37 degree C. for 45 or 72 hours depending on the media used: 1%BSA for 45 hours or CHO-5 for 72 hours.

[1244] On day four, using a 300 ul multichannel pipetter, aliquot 600 ul in one 1 ml deep well plate and the remaining supernatant into a 2 ml deep well. The supernatants from each well can then be used in the assays described in Examples 32-39.

[1245] It is specifically understood that when activity is obtained in any of the assays described below using a supernatant, the activity originates from either the polypeptide of the present invention directly (e.g., as a secreted protein) or by polypeptide of the present invention inducing expression of other proteins, which are then secreted into the supernatant. Thus, the invention further provides a method of identifying the protein in the supernatant characterized by an activity in a particular assay.

### Example 31

[1246] Construction of GAS Reporter Construct

[1247] One signal transduction pathway involved in the differentiation and proliferation of cells is called the Jaks-STATs pathway. Activated proteins in the Jaks-STATs pathway bind to gamma activation site “GAS” elements or interferon-sensitive responsive element (“ISRE”), located in the promoter of many genes. The binding of a protein to these elements alter the expression of the associated gene.

[1248] GAS and ISRE elements are recognized by a class of transcription factors called Signal Transducers and Activators of Transcription, or “STATs.” There are six members of the STATs family. Stat1 and Stat3 are present in many cell types, as is Stat2 (as response to IFN-alpha is widespread). Stat4 is more restricted and is not in many cell types though it has been found in T helper class I, cells after treatment with IL-12. Stat5 was originally called mammary growth factor, but has been found at higher concentrations in other cells including myeloid cells. It can be activated in tissue culture cells by many cytokines.

[1249] The STATs are activated to translocate from the cytoplasm to the nucleus upon tyrosine phosphorylation by a set of kinases known as the Janus Kinase (“Jaks”) family. Jaks represent a distinct family of soluble tyrosine kinases and include Tyk2, Jak1, Jak2, and Jak3. These kinases display significant sequence similarity and are generally catalytically inactive in resting cells.

[1250] The Jaks are activated by a wide range of receptors summarized in the Table below. (Adapted from review by Schidler and Darnell, Ann. Rev. Biochem. 64:621-51 (1995).) A cytokine receptor family, capable of activating Jaks, is divided into two groups: (a) Class 1 includes receptors for IL-2, IL-3, IL-4, IL-6, IL-7, IL-9, IL-11, IL-12, IL-15, Epo, PRL, GH, G-CSF, GM-CSF, LIF, CNTF, and thrombopoietin; and (b) Class 2 includes IFN-a, IFN-g, and IL-10. The Class 1 receptors share a conserved cysteine motif (a set of four conserved cysteines and one tryptophan) and a WSXWS motif (a membrane proximal region encoding Trp-Ser-Xaa-Trp-Ser (SEQ ID NO:2)).

[1251] Thus, on binding of a ligand to a receptor, Jaks are activated, which in turn activate STATs, which then translocate and bind to GAS elements. This entire process is emcompassed in the Jaks-STATs signal transduction pathway.

[1252] Therefore, activation of the Jaks-STATs pathway, reflected by the binding of the GAS or the ISRE element, can be used to indicate proteins involved in the proliferation and differentiation of cells. For example, growth factors and cytokines are known to activate the Jaks-STATs pathway. (See Table below.) Thus, by using GAS elements linked to reporter molecules, activators of the Jaks-STATs pathway can be identified.

| | JAKs | | | | | |
|---|---|---|---|---|---|---|
| Ligand | tyk2 | Jak1 | Jak2 | Jak3 | STATS | GAS (elements) or ISRE |
| IFN family | | | | | | |
| IFN-a/B | + | + | − | − | 1, 2, 3 | ISRE |
| IFN-g | | + | + | − | 1 | GAS (IRF1>Lys6>IFP) |
| Il-10 | + | ? | ? | − | 1, 3 | |
| gp130 family | | | | | | |
| IL-6 (Pleiotropic) | + | + | + | ? | 1, 3 | GAS (IRF1>Lys6>IFP) |
| Il-11 (Pleiotropic) | ? | + | ? | ? | 1, 3 | |
| OnM (Pleiotropic) | ? | + | + | ? | 1, 3 | |
| LIF (Pleiotropic) | ? | + | + | ? | 1, 3 | |
| CNTF (Pleiotropic) | −/+ | + | + | ? | 1, 3 | |
| G-CSF (Pleiotropic) | ? | + | ? | ? | 1, 3 | |
| IL-12 (Pleiotropic) | + | − | + | + | 1, 3 | |
| g-C family | | | | | | |
| IL-2 (lymphocytes) | − | + | − | + | 1, 3, 5 | GAS |
| IL-4 (lymph/myeloid) | − | + | − | + | 6 | GAS (IRF1 = IFP >>Ly6)(IgH) |
| IL-7 (lymphocytes) | − | + | − | + | 5 | GAS |
| IL-9 (lymphocytes) | − | + | − | + | 5 | GAS |
| IL-13 (lymphocyte) | − | + | ? | ? | 6 | GAS |
| IL-15 | ? | + | ? | + | 5 | GAS |
| gp140 family | | | | | | |
| IL-3 (myeloid) | − | − | + | − | 5 | GAS (IRF1>IFP>>Ly6) |
| IL-5 (myeloid) | − | − | + | − | 5 | GAS |
| GM-CSF (myeloid) | − | − | + | − | 5 | GAS |
| Growth hormone family | | | | | | |
| GH | ? | − | + | − | 5 | |
| PRL | ? | +/− | + | − | 1, 3, 5 | |
| EPO | ? | − | + | − | 5 | GAS(B-CAS>IRF1=IFP>>Ly6) |
| Receptor Tyrosine Kinases | | | | | | |
| EGF | ? | + | + | − | 1, 3 | GAS (IRF1) |
| PDGF | ? | + | + | − | 1, 3 | |
| CSF-1 | ? | + | + | − | 1, 3 | GAS (not IRF1) |

[1253] To construct a synthetic GAS containing promoter element, which is used in the Biological Assays described in Examples 32-33, a PCR based strategy is employed to generate a GAS-SV40 promoter sequence. The 5′ primer contains four tandem copies of the GAS binding site found in the IRF1 promoter and previously demonstrated to bind STATs upon induction with a range of cytokines (Rothman et al., Immunity 1:457-468 (1994).), although other GAS or ISRE elements can be used instead. The 5′ primer also contains 18 bp of sequence complementary to the SV40 early promoter sequence and is flanked with an XhoI site. The sequence of the 5′ primer is:

| | |
|---|---|
| 5′:GCGCCTCGAGATTTCCCCGAAATCTAGATTTC | (SEQ ID NO: 3) |
| CCCGAAATGATTTCCCCGAAATGATTTCCCCGAAA | |
| TATCTGCCATCTCAATTAG:3′ | |

[1254] The downstream primer is complementary to the SV40 promoter and is flanked with a Hind III site: 5′:GCGGCAAGCTTTTTGCAAAGCCTAGGC:3′ (SEQ ID NO: 4)

[1255] PCR amplification is performed using the SV40 promoter template present in the B-gal:promoter plasmid obtained from Clontech. The resulting PCR fragment is digested with XhoI/Hind III and subcloned into BLSK2-. (Stratagene.) Sequencing with forward and reverse primers confirms that the insert contains the following sequence:

| | |
|---|---|
| 5′:CTCGAGATTTCCCCGAAATCTAGATTTCCCCGAAATGATTTCCCCGAAATG | (SEQ ID NO: 5) |
| ATTTCCCCGAAATATCTGCCATCTCAATTAGTCAGCAACCATAGTCCCGCCCC | |
| TAACTCCGCCCATCCCGCCCCTAACTCCGCCCAGTTCCGCCCATTCTCCGCCC | |
| CATGGCTGACTAATTTTTTTTATTTATGCAGAGGCCGAGGCCGCCTCGGCCTC | |
| TGAGCTATTCCAGAAGTAGTGAGGAGGCTTTTTTGGAGGCCTAGGCTTTTGCA | |
| AAAAGCTT:3′ | |

[1256] With this GAS promoter element linked to the SV40 promoter, a GAS:SEAP2 reporter construct is next engineered. Here, the reporter molecule is a secreted alkaline phosphatase, or “SEAP.” Clearly, however, any reporter molecule can be used instead of SEAP, in this or in any of the other Examples. Well known reporter molecules that can be used instead of SEAP include chloramphenicol acetyltransferase (CAT), luciferase, alkaline phosphatase, B-galactosidase, green fluorescent protein (GFP), or any protein detectable by an antibody.

[1257] The above sequence confirmed synthetic GAS-SV40 promoter element is subcloned into the pSEAP-Promoter vector obtained from Clontech using HindIII and XhoI, effectively replacing the SV40 promoter with the amplified GAS:SV40 promoter element, to create the GAS-SEAP vector. However, this vector does not contain a neomycin resistance gene, and therefore, is not preferred for mammalian expression systems.

[1258] Thus, in order to generate mammalian stable cell lines expressing the GAS-SEAP reporter, the GAS-SEAP cassette is removed from the GAS-SEAP vector using SalI and NotI, and inserted into a backbone vector containing the neomycin resistance gene, such as pGFP-1 (Clontech), using these restriction sites in the multiple cloning site, to create the GAS-SEAP/Neo vector. Once this vector is transfected into mammalian cells, this vector can then be used as a reporter molecule for GAS binding as described in Examples 32-33.

[1259] Other constructs can be made using the above description and replacing GAS with a different promoter sequence. For example, construction of reporter molecules containing NFK-B and EGR promoter sequences are described in Examples 34 and 35. However, many other promoters can be substituted using the protocols described in these Examples. For instance, SRE, IL-2, NFAT, or Osteocalcin promoters can be substituted, alone or in combination (e.g., GAS/NF-KB/EGR, GAS/NF-KB, Il-2/NFAT, or NF-KB/GAS). Similarly, other cell lines can be used to test reporter construct activity, such as HELA (epithelial), HUVEC (endothelial), Reh (B-cell), Saos-2 (osteoblast), HUVAC (aortic), or Cardiomyocyte.

### Example 32

[1260] High-Throughput Screening Assay for T-cell Activity

[1261] The following protocol is used to assess T-cell activity by identifying factors, and determining whether supernate containing a polypeptide of the invention proliferates and/or differentiates T-cells. T-cell activity is assessed using the GAS/SEAP/Neo construct produced in Example 31. Thus, factors that increase SEAP activity indicate the ability to activate the Jaks-STATS signal transduction pathway. The T-cell used in this assay is Jurkat T-cells (ATCC Accession No. TIB-152), although Molt-3 cells (ATCC Accession No. CRL-1552) and Molt-4 cells (ATCC Accession No. CRL-1582) cells can also be used.

[1262] Jurkat T-cells are lymphoblastic CD4+ Th1 helper cells. In order to generate stable cell lines, approximately 2 million Jurkat cells are transfected with the GAS-SEAP/neo vector using DMRIE-C (Life Technologies)(transfection procedure described below). The transfected cells are seeded to a density of approximately 20,000 cells per well and transfectants resistant to 1 mg/ml genticin selected. Resistant colonies are expanded and then tested for their response to increasing concentrations of interferon gamma. The dose response of a selected clone is demonstrated.

[1263] Specifically, the following protocol will yield sufficient cells for 75 wells containing 200 ul of cells. Thus, it is either scaled up, or performed in multiple to generate sufficient cells for multiple 96 well plates. Jurkat cells are maintained in RPMI+10% serum with 1%Pen-Strep. Combine 2.5 mls of OPTI-MEM (Life Technologies) with 10 ug of plasmid DNA in a T25 flask. Add 2.5 ml OPTI-MEM containing 50 ul of DMRIE-C and incubate at room temperature for 15-45 mins.

[1264] During the incubation period, count cell concentration, spin down the required number of cells (10⁷ per transfection), and resuspend in OPTI-MEM to a final concentration of 10⁷ cells/ml. Then add 1 ml of 1×10⁷ cells in OPTI-MEM to T25 flask and incubate at 37 degree C. for 6 hrs. After the incubation, add 10 ml of RPMI+15% serum.

[1265] The Jurkat:GAS-SEAP stable reporter lines are maintained in RPMI+10% serum, 1 mg/ml Genticin, and 1% Pen-Strep. These cells are treated with supernatants containing polypeptide of the present invention or polypeptide of the present invention induced polypeptides as produced by the protocol described in Example 30.

[1266] On the day of treatment with the supernatant, the cells should be washed and resuspended in fresh RPMI+10% serum to a density of 500,000 cells per ml. The exact number of cells required will depend on the number of supernatants being screened. For one 96 well plate, approximately 10 million cells (for 10 plates, 100 million cells) are required.

[1267] Transfer the cells to a triangular reservoir boat, in order to dispense the cells into a 96 well dish, using a 12 channel pipette. Using a 12 channel pipette, transfer 200 ul of cells into each well (therefore adding 100,000 cells per well).

[1268] After all the plates have been seeded, 50 ul of the supernatants are transferred directly from the 96 well plate containing the supernatants into each well using a 12 channel pipette. In addition, a dose of exogenous interferon gamma (0.1, 1.0, 10 ng) is added to wells H9, H10, and H11 to serve as additional positive controls for the assay.

[1269] The 96 well dishes containing Jurkat cells treated with supernatants are placed in an incubator for 48 hrs (note: this time is variable between 48-72 hrs). 35 ul samples from each well are then transferred to an opaque 96 well plate using a 12 channel pipette. The opaque plates should be covered (using sellophene covers) and stored at −20 degree C. until SEAP assays are performed according to Example 36. The plates containing the remaining treated cells are placed at 4 degree C. and serve as a source of material for repeating the assay on a specific well if desired.

[1270] As a positive control, 100 Unit/ml interferon gamma can be used which is known to activate Jurkat T cells. Over 30 fold induction is typically observed in the positive control wells.

[1271] The above protocol may be used in the generation of both transient, as well as stable, transfected cells, which would be apparent to those of skill in the art.

### Example 33

[1272] High-Throughput Screening Assay Identifying Myeloid Activity

[1273] The following protocol is used to assess myeloid activity of polypeptide of the present invention by determining whether polypeptide of the present invention proliferates and/or differentiates myeloid cells. Myeloid cell activity is assessed using the GAS/SEAP/Neo construct produced in Example 31. Thus, factors that increase SEAP activity indicate the ability to activate the Jaks-STATS signal transduction pathway. The myeloid cell used in this assay is U937, a pre-monocyte cell line, although TF-1, HL60, or KG1 can be used.

[1274] To transiently transfect U937 cells with the GAS/SEAP/Neo construct produced in Example 31, a DEAE-Dextran method (Kharbanda et. al., 1994, Cell Growth & Differentiation, 5:259-265) is used. First, harvest 2×10⁷ U937 cells and wash with PBS. The U937 cells are usually grown in RPMI 1640 medium containing 10% heat-inactivated fetal bovine serum (FBS) supplemented with 100 units/ml penicillin and 100 mg/ml streptomycin.

[1275] Next, suspend the cells in 1 ml of 20 mM Tris-HCl (pH 7.4) buffer containing 0.5 mg/ml DEAE-Dextran, 8 ug GAS-SEAP2 plasmid DNA, 140 mM NaCl, 5 mM KCl, 375 uM Na₂HPO₄.7H₂O, 1 mM MgCl₂, and 675 uM CaCl₂. Incubate at 37 degrees C. for 45 min.

[1276] Wash the cells with RPMI 1640 medium containing 10% FBS and then resuspend in 10 ml complete medium and incubate at 37 degree C. for 36 hr.

[1277] The GAS-SEAP/U937 stable cells are obtained by growing the cells in 400 ug/ml G418. The G418-free medium is used for routine growth but every one to two months, the cells should be re-grown in 400 ug/ml G418 for couple of passages.

[1278] These cells are tested by harvesting 1×10⁸ cells (this is enough for ten 96-well plates assay) and wash with PBS. Suspend the cells in 200 ml above described growth medium, with a final density of 5×10⁵ cells/ml. Plate 200 ul cells per well in the 96-well plate (or 1×10⁵ cells/well).

[1279] Add 50 ul of the supernatant prepared by the protocol described in Example 30. Incubate at 37 degee C. for 48 to 72 hr. As a positive control, 100 Unit/ml interferon gamma can be used which is known to activate U937 cells. Over 30 fold induction is typically observed in the positive control wells. SEAP assay the supernatant according to the protocol described in Example 36.

### Example 34

[1280] High-Throughput Screening Assay Identifying Neuronal Activity

[1281] When cells undergo differentiation and proliferation, a group of genes are activated through many different signal transduction pathways. One of these genes, EGR1 (early growth response gene 1), is induced in various tissues and cell types upon activation. The promoter of EGR1 is responsible for such induction. Using the EGR1 promoter linked to reporter molecules, activation of cells can be assessed by polypeptide of the present invention.

[1282] Particularly, the following protocol is used to assess neuronal activity in PC12 cell lines. PC12 cells (rat phenochromocytoma cells) are known to proliferate and/or differentiate by activation with a number of mitogens, such as TPA (tetradecanoyl phorbol acetate), NGF (nerve growth factor), and EGF (epidermal growth factor). The EGR1 gene expression is activated during this treatment. Thus, by stably transfecting PC12 cells with a construct containing an EGR promoter linked to SEAP reporter, activation of PC12 cells by polypeptide of the present invention can be assessed.

[1283] The EGR/SEAP reporter construct can be assembled by the following protocol. The EGR-1 promoter sequence (−633 to +1)(Sakamoto K et al., Oncogene 6:867-871 (1991)) can be PCR amplified from human genomic DNA using the following primers:

| | |
|---|---|
| 5′ GCGCTCGAGGGATGACAGCGATAGAACCCCGG-3′ | (SEQ ID |
| | NO: 6) |
| 5′ GCGAAGCTTCGCGACTCCCCGGATCCGCCTC-3′ | (SEQ ID |
| | NO: 7) |

[1284] Using the GAS:SEAP/Neo vector produced in Example 31, EGR1 amplified product can then be inserted into this vector. Linearize the GAS:SEAP/Neo vector using restriction enzymes XhoI/HindIII, removing the GAS/SV40 stuffer. Restrict the EGR1 amplified product with these same enzymes. Ligate the vector and the EGR1 promoter.

[1285] To prepare 96 well-plates for cell culture, two mls of a coating solution (1:30 dilution of collagen type I (Upstate Biotech Inc. Cat#08-115) in 30% ethanol (filter sterilized)) is added per one 10 cm plate or 50 ml per well of the 96-well plate, and allowed to air dry for 2 hr.

[1286] PC12 cells are routinely grown in RPMI-1640 medium (Bio Whittaker) containing 10% horse serum (JRH BIOSCIENCES, Cat. # 12449-78P), 5% heat-inactivated fetal bovine serum (FBS) supplemented with 100 units/ml penicillin and 100 ug/ml streptomycin on a precoated 10 cm tissue culture dish. One to four split is done every three to four days. Cells are removed from the plates by scraping and resuspended with pipetting up and down for more than 15 times.

[1287] Transfect the EGR/SEAP/Neo construct into PC12 using the Lipofectamine protocol described in Example 30. EGR-SEAP/PC12 stable cells are obtained by growing the cells in 300 ug/ml G418. The G418-free medium is used for routine growth but every one to two months, the cells should be re-grown in 300 ug/ml G418 for couple of passages.

[1288] To assay for neuronal activity, a 10 cm plate with cells around 70 to 80% confluent is screened by removing the old medium. Wash the cells once with PBS (Phosphate buffered saline). Then starve the cells in low serum medium (RPMI-1640 containing 1% horse serum and 0.5% FBS with antibiotics) overnight.

[1289] The next morning, remove the medium and wash the cells with PBS. Scrape off the cells from the plate, suspend the cells well in 2 ml low serum medium. Count the cell number and add more low serum medium to reach final cell density as 5×10⁵ cells/ml.

[1290] Add 200 ul of the cell suspension to each well of 96-well plate (equivalent to 1×10⁵ cells/well). Add 50 ul supernatant produced by Example 30, 37 degree C. for 48 to 72 hr. As a positive control, a growth factor known to activate PC12 cells through EGR can be used, such as 50 ng/ul of Neuronal Growth Factor (NGF). Over fifty-fold induction of SEAP is typically seen in the positive control wells. SEAP assay the supernatant according to Example 36.

### Example 35

[1291] High-Throughput Screening Assay for T-cell Activity

[1292] NF-KB (Nuclear Factor KB) is a transcription factor activated by a wide variety of agents including the inflammatory cytokines IL-1 and TNF, CD30 and CD40, lymphotoxin-alpha and lymphotoxin-beta, by exposure to LPS or thrombin, and by expression of certain viral gene products. As a transcription factor, NF-KB regulates the expression of genes involved in immune cell activation, control of apoptosis (NF-KB appears to shield cells from apoptosis), B and T-cell development, anti-viral and antimicrobial responses, and multiple stress responses.

[1293] In non-stimulated conditions, NF-KB is retained in the cytoplasm with I-KB (Inhibitor KB). However, upon stimulation, I-KB is phosphorylated and degraded, causing NF-KB to shuttle to the nucleus, thereby activating transcription of target genes. Target genes activated by NF-KB include IL-2, IL-6, GM-CSF, ICAM-1 and class 1 MHC.

[1294] Due to its central role and ability to respond to a range of stimuli, reporter constructs utilizing the NF-KB promoter element are used to screen the supernatants produced in Example 30. Activators or inhibitors of NF-KB would be useful in treating, preventing, and/or diagnosing diseases. For example, inhibitors of NF-KB could be used to treat those diseases related to the acute or chronic activation of NF-KB, such as rheumatoid arthritis.

[1295] To construct a vector containing the NF-KB promoter element, a PCR based strategy is employed. The upstream primer contains four tandem copies of the NF-KB binding site (GGGGACTTTCCC) (SEQ ID NO: 8), 18 bp of sequence complementary to the 5′ end of the SV40 early promoter sequence, and is flanked with an XhoI site:

| | |
|---|---|
| 5′:GCGGCCTCGAGGGGACTTTCCCGGGGACTTTC | (SEQ ID NO: 9) |
| CGGGGACTTTCCGGGACTTTCCATCCTGCCATCTC | |
| AATTAG:3′ | |

[1296] The downstream primer is complementary to the 3′ end of the SV40 promoter and is flanked with a Hind III site:

| | |
|---|---|
| 5′:GCGGCAAGCTTTTTGCAAAGCCTAGGC:3′ | (SEQ ID NO: 4) |

[1297] PCR amplification is performed using the SV40 promoter template present in the pB-gal:promoter plasmid obtained from Clontech. The resulting PCR fragment is digested with XhoI and Hind III and subcloned into BLSK2-. (Stratagene) Sequencing with the T7 and T3 primers confirms the insert contains the following sequence:

| | |
|---|---|
| 5′:CTCGAGGGGACTTTCCCGGGGACTTTCCGGGGACTTTCCGGGACTTTCCAT | (SEQ ID NO: 10) |
| CTGCCATCTCAATTAGTCAGCAACCATAGTCCCGCCCCTAACTCCGCCCATCC | |
| CGCCCCTAACTCCGCCCAGTTCCGCCCATTCTCCGCCCCATGGCTGACTAATT | |
| TTTTTTATTTATGCAGAGGCCGAGGCCGCCTCGGCCTCTGAGCTATTCCAGAA | |
| GTAGTGAGGAGGCTTTTTTGGAGGCCTAGGCTTTTGCAAAAAGCTT:3′ | |

[1298] Next, replace the SV40 minimal promoter element present in the pSEAP2-promoter plasmid (Clontech) with this NF-KB/SV40 fragment using XhoI and HindIII. However, this vector does not contain a neomycin resistance gene, and therefore, is not preferred for mammalian expression systems.

[1299] In order to generate stable mammalian cell lines, the NF-KB/SV40/SEAP cassette is removed from the above NF-KB/SEAP vector using restriction enzymes SalI and NotI, and inserted into a vector containing neomycin resistance. Particularly, the NF-KB/SV40/SEAP cassette was inserted into pGFP-1 (Clontech), replacing the GFP gene, after restricting pGFP-1 with SalI and NotI.

[1300] Once NF-KB/SV40/SEAP/Neo vector is created, stable Jurkat T-cells are created and maintained according to the protocol described in Example 32. Similarly, the method for assaying supernatants with these stable Jurkat T-cells is also described in Example 32. As a positive control, exogenous TNF alpha (0.1,1, 10 ng) is added to wells H9, H10, and H11, with a 5-10 fold activation typically observed.

### Example 36

[1301] Assay for SEAP Activity

[1302] As a reporter molecule for the assays described in Examples 32-35, SEAP activity is assayed using the Tropix Phospho-light Kit (Cat. BP-400) according to the following general procedure. The Tropix Phospho-light Kit supplies the Dilution, Assay, and Reaction Buffers used below.

[1303] Prime a dispenser with the 2.5× Dilution Buffer and dispense 15 ul of 2.5× dilution buffer into Optiplates containing 35 ul of a supernatant. Seal the plates with a plastic sealer and incubate at 65 degree C. for 30 min. Separate the Optiplates to avoid uneven heating.

[1304] Cool the samples to room temperature for 15 minutes. Empty the dispenser and prime with the Assay Buffer. Add 50 ml Assay Buffer and incubate at room temperature 5 min. Empty the dispenser and prime with the Reaction Buffer (see the Table below). Add 50 ul Reaction Buffer and incubate at room temperature for 20 minutes. Since the intensity of the chemiluminescent signal is time dependent, and it takes about 10 minutes to read 5 plates on a luminometer, thus one should treat 5 plates at each time and start the second set 10 minutes later.

[1305] Read the relative light unit in the luminometer. Set H12 as blank, and print the results. An increase in chemiluminescence indicates reporter activity.

Reaction Buffer Formulation:

| # of plates | Rxn buffer diluent (ml) | CSPD (ml) |
|---|---|---|
| 10 | 60 | 3 |
| 11 | 65 | 3.25 |
| 12 | 70 | 3.5 |
| 13 | 75 | 3.75 |
| 14 | 80 | 4 |
| 15 | 85 | 4.25 |
| 16 | 90 | 4.5 |
| 17 | 95 | 4.75 |
| 18 | 100 | 5 |
| 19 | 105 | 5.25 |
| 20 | 110 | 5.5 |
| 21 | 115 | 5.75 |
| 22 | 120 | 6 |
| 23 | 125 | 6.25 |
| 24 | 130 | 6.5 |
| 25 | 135 | 6.75 |
| 26 | 140 | 7 |
| 27 | 145 | 7.25 |
| 28 | 150 | 7.5 |
| 29 | 155 | 7.75 |
| 30 | 160 | 8 |
| 31 | 165 | 8.25 |
| 32 | 170 | 8.5 |
| 33 | 175 | 8.75 |
| 34 | 180 | 9 |
| 35 | 185 | 9.25 |
| 36 | 190 | 9.5 |
| 37 | 195 | 9.75 |
| 38 | 200 | 10 |
| 39 | 205 | 10.25 |
| 40 | 210 | 10.5 |
| 41 | 215 | 10.75 |
| 42 | 220 | 11 |
| 43 | 225 | 11.25 |
| 44 | 230 | 11.5 |
| 45 | 235 | 11.75 |
| 46 | 240 | 12 |
| 47 | 245 | 12.25 |
| 48 | 250 | 12.5 |
| 49 | 255 | 12.75 |
| 50 | 260 | 13 |

### Example 37

[1306] High-Throughput Screening Assay Identifying Changes in Small Molecule Concentration and Membrane Permeability

[1307] Binding of a ligand to a receptor is known to alter intracellular levels of small molecules, such as calcium, potassium, sodium, and pH, as well as alter membrane potential. These alterations can be measured in an assay to identify supernatants which bind to receptors of a particular cell. Although the following protocol describes an assay for calcium, this protocol can easily be modified to detect changes in potassium, sodium, pH, membrane potential, or any other small molecule which is detectable by a fluorescent probe.

[1308] The following assay uses Fluorometric Imaging Plate Reader (“FLIPR”) to measure changes in fluorescent molecules (Molecular Probes) that bind small molecules. Clearly, any fluorescent molecule detecting a small molecule can be used instead of the calcium fluorescent molecule, fluo-4 (Molecular Probes, Inc.; catalog no. F-14202), used here.

[1309] For adherent cells, seed the cells at 10,000-20,000 cells/well in a Co-star black 96-well plate with clear bottom. The plate is incubated in a CO₂ incubator for 20 hours. The adherent cells are washed two times in Biotek washer with 200 ul of HBSS (Hank's Balanced Salt Solution) leaving 100 ul of buffer after the final wash.

[1310] A stock solution of 1 mg/ml fluo-4 is made in 10% pluronic acid DMSO. To load the cells with fluo-4, 50 ul of 12 ug/ml fluo-4 is added to each well. The plate is incubated at 37 degrees C. in a CO₂ incubator for 60 min. The plate is washed four times in the Biotek washer with HBSS leaving 100 ul of buffer.

[1311] For non-adherent cells, the cells are spun down from culture media. Cells are re-suspended to 2-5×10⁶ cells/ml with HBSS in a 50-ml conical tube. 4 ul of 1 mg/ml fluo-4 solution in 10% pluronic acid DMSO is added to each ml of cell suspension. The tube is then placed in a 37 degrees C. water bath for 30-60 min. The cells are washed twice with HBSS, resuspended to 1×10⁶ cells/ml, and dispensed into a microplate, 100 ul/well. The plate is centrifuged at 1000 rpm for 5 min. The plate is then washed once in Denley Cell Wash with 200 ul, followed by an aspiration step to 100 ul final volume.

[1312] For a non-cell based assay, each well contains a fluorescent molecule, such as fluo-4. The supernatant is added to the well, and a change in fluorescence is detected.

[1313] To measure the fluorescence of intracellular calcium, the FLIPR is set for the following parameters: (1) System gain is 300-800 mW; (2) Exposure time is 0.4 second; (3) Camera F/stop is F/2; (4) Excitation is 488 nm; (5) Emission is 530 nm; and (6) Sample addition is 50 ul. Increased emission at 530 nm indicates an extracellular signaling event caused by the a molecule, either polypeptide of the present invention or a molecule induced by polypeptide of the present invention, which has resulted in an increase in the intracellular Ca⁺⁺ concentration.

### Example 38

[1314] High-Throughput Screening Assay Identifying Tyrosine Kinase Activity

[1315] The Protein Tyrosine Kinases (PTK) represent a diverse group of transmembrane and cytoplasmic kinases. Within the Receptor Protein Tyrosine Kinase RPTK) group are receptors for a range of mitogenic and metabolic growth factors including the PDGF, FGF, EGF, NGF, HGF and Insulin receptor subfamilies. In addition there are a large family of RPTKs for which the corresponding ligand is unknown. Ligands for RPTKs include mainly secreted small proteins, but also membrane-bound and extracellular matrix proteins.

[1316] Activation of RPTK by ligands involves ligand-mediated receptor dimerization, resulting in transphosphorylation of the receptor subunits and activation of the cytoplasmic tyrosine kinases. The cytoplasmic tyrosine kinases include receptor associated tyrosine kinases of the src-family (e.g., src, yes, Ick, lyn, fyn) and non-receptor linked and cytosolic protein tyrosine kinases, such as the Jak family, members of which mediate signal transduction triggered by the cytokine superfamily of receptors (e.g., the Interleukins, Interferons, GM-CSF, and Leptin).

[1317] Because of the wide range of known factors capable of stimulating tyrosine kinase activity, identifying whether polypeptide of the present invention or a molecule induced by polypeptide of the present invention is capable of activating tyrosine kinase signal transduction pathways is of interest. Therefore, the following protocol is designed to identify such molecules capable of activating the tyrosine kinase signal transduction pathways.

[1318] Seed target cells (e.g., primary keratinocytes) at a density of approximately 25,000 cells per well in a 96 well Loprodyne Silent Screen Plates purchased from Nalge Nunc (Naperville, Ill.). The plates are sterilized with two 30 minute rinses with 100% ethanol, rinsed with water and dried overnight. Some plates are coated for 2 hr with 100 ml of cell culture grade type I collagen (50 mg/ml), gelatin (2%) or polylysine (50 mg/ml), all of which can be purchased from Sigma Chemicals (St. Louis, Mo.) or 10% Matrigel purchased from Becton Dickinson (Bedford,Mass.), or calf serum, rinsed with PBS and stored at 4 degree C. Cell growth on these plates is assayed by seeding 5,000 cells/well in growth medium and indirect quantitation of cell number through use of alamarBlue as described by the manufacturer Alamar Biosciences, Inc. (Sacramento, Calif.) after 48 hr. Falcon plate covers #3071 from Becton Dickinson (Bedford,Mass.) are used to cover the Loprodyne Silent Screen Plates. Falcon Microtest III cell culture plates can also be used in some proliferation experiments.

[1319] To prepare extracts, A431 cells are seeded onto the nylon membranes of Loprodyne plates (20,000/200 ml/well) and cultured overnight in complete medium. Cells are quiesced by incubation in serum-free basal medium for 24 hr. After 5-20 minutes treatment with EGF (60 ng/ml) or 50 ul of the supernatant produced in Example 30, the medium was removed and 100 ml of extraction buffer ((20 mM HEPES pH 7.5, 0.15 M NaCl, 1% Triton X-100, 0.1% SDS, 2 mM Na3VO4, 2 mM Na4P2O7 and a cocktail of protease inhibitors (# 1836170) obtained from Boeheringer Mannheim (Indianapolis, Ind.)) is added to each well and the plate is shaken on a rotating shaker for 5 minutes at 4° C. The plate is then placed in a vacuum transfer manifold and the extract filtered through the 0.45 mm membrane bottoms of each well using house vacuum. Extracts are collected in a 96-well catch/assay plate in the bottom of the vacuum manifold and immediately placed on ice. To obtain extracts clarified by centrifugation, the content of each well, after detergent solubilization for 5 minutes, is removed and centrifuged for 15 minutes at 4 degree C at 16,000×g.

[1320] Test the filtered extracts for levels of tyrosine kinase activity. Although many methods of detecting tyrosine kinase activity are known, one method is described here.

[1321] Generally, the tyrosine kinase activity of a supernatant is evaluated by determining its ability to phosphorylate a tyrosine residue on a specific substrate (a biotinylated peptide). Biotinylated peptides that can be used for this purpose include PSK1 (corresponding to amino acids 6-20 of the cell division kinase cdc2-p34) and PSK2 (corresponding to amino acids 1-17 of gastrin). Both peptides are substrates for a range of tyrosine kinases and are available from Boehringer Mannheim.

[1322] The tyrosine kinase reaction is set up by adding the following components in order. First, add 10 ul of 5 uM Biotinylated Peptide, then 10 ul ATP/Mg₂₊ (5 mM ATP/50 mM MgCl₂), then 10 ul of 5× Assay Buffer (40 mM imidazole hydrochloride, pH7.3, 40 mM beta-glycerophosphate, 1 mM EGTA, 100 mM MgCl₂, 5 mM MnCl₂, 0.5 mg/ml BSA), then 5 ul of Sodium Vanadate (1 mM), and then 5 ul of water. Mix the components gently and preincubate the reaction mix at 30 degree C. for 2 min. Initial the reaction by adding 10 ul of the control enzyme or the filtered supernatant.

[1323] The tyrosine kinase assay reaction is then terminated by adding 10 ul of 120 mm EDTA and place the reactions on ice.

[1324] Tyrosine kinase activity is determined by transferring 50 ul aliquot of reaction mixture to a microtiter plate (MTP) module and incubating at 37 degree C. for 20 min. This allows the streptavidin coated 96 well plate to associate with the biotinylated peptide. Wash the MTP module with 300 ul/well of PBS four times. Next add 75 ul of anti-phospotyrosine antibody conjugated to horse radish peroxidase (anti-P-Tyr-POD(0.5 u/ml)) to each well and incubate at 37 degree C. for one hour. Wash the well as above.

[1325] Next add 100 ul of peroxidase substrate solution (Boehringer Mannheim) and incubate at room temperature for at least 5 mins (up to 30 min). Measure the absorbance of the sample at 405 nm by using ELISA reader. The level of bound peroxidase activity is quantitated using an ELISA reader and reflects the level of tyrosine kinase activity.

### Example 39

[1326] High-Throughput Screening Assay Identifying Phosphorylation Activity

[1327] As a potential alternative and/or complement to the assay of protein tyrosine kinase activity described in Example 38, an assay which detects activation (phosphorylation) of major intracellular signal transduction intermediates can also be used. For example, as described below one particular assay can detect tyrosine phosphorylation of the Erk-1 and Erk-2 kinases. However, phosphorylation of other molecules, such as Raf, JNK, p38 MAP, Map kinase kinase (MEK), MEK kinase, Src, Muscle specific kinase (MuSK), IRAK, Tec, and Janus, as well as any other phosphoserine, phosphotyrosine, or phosphothreonine molecule, can be detected by substituting these molecules for Erk-1 or Erk-2 in the following assay.

[1328] Specifically, assay plates are made by coating the wells of a 96-well ELISA plate with 0.1 ml of protein G (1 ug/ml) for 2 hr at room temp, (RT). The plates are then rinsed with PBS and blocked with 3% BSA/PBS for 1 hr at RT. The protein G plates are then treated with 2 commercial monoclonal antibodies (100 ng/well) against Erk-1 and Erk-2 (1 hr at RT) (Santa Cruz Biotechnology). (To detect other molecules, this step can easily be modified by substituting a monoclonal antibody detecting any of the above described molecules.) After 3-5 rinses with PBS, the plates are stored at 4 degree C. until use.

[1329] A431 cells are seeded at 20,000/well in a 96-well Loprodyne filterplate and cultured overnight in growth medium. The cells are then starved for 48 hr in basal medium (DMEM) and then treated with EGF (6 ng/well) or 50 ul of the supernatants obtained in Example 30 for 5-20 minutes. The cells are then solubilized and extracts filtered directly into the assay plate.

[1330] After incubation with the extract for 1 hr at RT, the wells are again rinsed. As a positive control, a commercial preparation of MAP kinase (10 ng/well) is used in place of A431 extract. Plates are then treated with a commercial polyclonal (rabbit) antibody (1 ug/ml) which specifically recognizes the phosphorylated epitope of the Erk-1 and Erk-2 kinases (1 hr at RT). This antibody is biotinylated by standard procedures. The bound polyclonal antibody is then quantitated by successive incubations with Europium-streptavidin and Europium fluorescence enhancing reagent in the Wallac DELFIA instrument (time-resolved fluorescence). An increased fluorescent signal over background indicates a phosphorylation by polypeptide of the present invention or a molecule induced by polypeptide of the present invention.

### Example 40

[1331] Assay for the Stimulation of Bone Marrow CD34+ Cell Proliferation

[1332] This assay is based on the ability of human CD34+ to proliferate in the presence of hematopoietic growth factors and evaluates the ability of isolated polypeptides expressed in mammalian cells to stimulate proliferation of CD34+ cells.

[1333] It has been previously shown that most mature precursors will respond to only a single signal. More immature precursors require at least two signals to respond. Therefore, to test the effect of polypeptides on hematopoietic activity of a wide range of progenitor cells, the assay contains a given polypeptide in the presence or absence of other hematopoietic growth factors. Isolated cells are cultured for 5 days in the presence of Stem Cell Factor (SCF) in combination with tested sample. SCF alone has a very limited effect on the proliferation of bone marrow (BM) cells, acting in such conditions only as a “survival” factor. However, combined with any factor exhibiting stimulatory effect on these cells (e.g., IL-3), SCF will cause a synergistic effect. Therefore, if the tested polypeptide has a stimulatory effect on hematopoietic progenitors, such activity can be easily detected. Since normal BM cells have a low level of cycling cells, it is likely that any inhibitory effect of a given polypeptide, or agonists or antagonists thereof, might not be detected. Accordingly, assays for an inhibitory effect on progenitors is preferably tested in cells that are first subjected to in vitro stimulation with SCF+IL+3, and then contacted with the compound that is being evaluated for inhibition of such induced proliferation.

[1334] Briefly, CD34+ cells are isolated using methods known in the art. The cells are thawed and resuspended in medium (QBSF 60 serum-free medium with 1% L-glutamine (500 ml) Quality Biological, Inc., Gaithersburg, Md. Cat# 160-204-101). After several gentle centrifugation steps at 200×g, cells are allowed to rest for one hour. The cell count is adjusted to 2.5×10⁵ cells/ml. During this time, 100 μl of sterile water is added to the peripheral wells of a 96-well plate. The cytokines that can be tested with a given polypeptide in this assay is rhSCF (R&D Systems, Minneapolis, Minn., Cat# 255-SC) at 50 ng/ml alone and in combination with rhSCF and rhIL-3 (R&D Systems, Minneapolis, Minn., Cat# 203-ML) at 30 ng/ml. After one hour, 10 μl of prepared cytokines, 50 μl of the supernatants prepared in Example 30 (supernatants at 1:2 dilution=50 μl) and 20 μl of diluted cells are added to the media which is already present in the wells to allow for a final total volume of 100 μl. The plates are then placed in a 37° C./5% CO₂ incubator for five days.

[1335] Eighteen hours before the assay is harvested, 0.5 μCi/well of [3H] Thymidine is added in a 10 μl volume to each well to determine the proliferation rate. The experiment is terminated by harvesting the cells from each 96-well plate to a filtermat using the Tomtec Harvester 96. After harvesting, the filtermats are dried, trimmed and placed into OmniFilter assemblies consisting of one OmniFilter plate and one OmniFilter Tray. 60 μl Microscint is added to each well and the plate sealed with TopSeal-A presson sealing film A bar code 15 sticker is affixed to the first plate for counting. The sealed plates are then loaded and the level of radioactivity determined via the Packard Top Count and the printed data collected for analysis. The level of radioactivity reflects the amount of cell proliferation.

[1336] The studies described in this example test the activity of a given polypeptide to stimulate bone marrow CD34+ cell proliferation. One skilled in the art could easily modify the exemplified studies to test the activity of polynucleotides (e.g., gene therapy), antibodies, agonists, and/or antagonists and fragments and variants thereof. As a nonlimiting example, potential antagonists tested in this assay would be expected to inhibit cell proliferation in the presence of cytokines and/or to increase the inhibition of cell proliferation in the presence of cytokines and a given polypeptide. In contrast, potential agonists tested in this assay would be expected to enhance cell proliferation and/or to decrease the inhibition of cell proliferation in the presence of cytokines and a given polypeptide.

[1337] The ability of a gene to stimulate the proliferation of bone marrow CD34+ cells indicates that polynucleotides and polypeptides corresponding to the gene are useful for the diagnosis and treatment of disorders affecting the immune system and hematopoiesis. Representative uses are described in the “Immune Activity” and “Infectious Disease” sections above, and elsewhere herein.

### Example 41

[1338] Assay for Extracellular Matrix Enhanced Cell Response (EMECR)

[1339] The objective of the Extracellular Matrix Enhanced Cell Response (EMECR) assay is to identify gene products (e.g., isolated polypeptides) that act on the hematopoietic stem cells in the context of the extracellular matrix (ECM) induced signal.

[1340] Cells respond to the regulatory factors in the context of signal(s) received from the surrounding microenvironment. For example, fibroblasts, and endothelial and epithelial stem cells fail to replicate in the absence of signals from the ECM. Hematopoietic stem cells can undergo self-renewal in the bone marrow, but not in in vitro suspension culture. The ability of stem cells to undergo self-renewal in vitro is dependent upon their interaction with the stromal cells and the ECM protein fibronectin (fn). Adhesion of cells to fn is mediated by the α₅.β₁ and α₄.β₁ integrin receptors, which are expressed by human and mouse hematopoietic stem cells. The factor(s) which integrate with the ECM environment and are responsible for stimulating stem cell self-renewal have not yet been identified. Discovery of such factors should be of great interest in gene therapy and bone marrow transplant applications.

[1341] Briefly, polystyrene, non tissue culture treated, 96-well plates are coated with fn fragment at a coating concentration of 0.2 μg/cm². Mouse bone marrow cells are plated (1,000 cells/well) in 0.2 ml of serum-free medium. Cells cultured in the presence of IL-3 (5 ng/ml )+SCF (50 ng/ml ) would serve as the positive control, conditions under which little self-renewal but pronounced differentiation of the stem cells is to be expected. Gene products of the invention (e.g., including, but not limited to, polynucleotides and polypeptides of the present invention, and supernatants produced in Example 30), are tested with appropriate negative controls in the presence and absence of SCF(5.0 ng/ml), where test factor supernatants represent 10% of the total assay volume. The plated cells are then allowed to grow by incubating in a low oxygen environment (5% CO₂, 7% O₂, and 88% N₂ ) tissue culture incubator for 7 days. The number of proliferating cells within the wells is then quantitated by measuring thymidine incorporation into cellular DNA. Verification of the positive hits in the assay will require phenotypic characterization of the cells, which can be accomplished by scaling up of the culture system and using appropriate antibody reagents against cell surface antigens and FACScan.

[1342] One skilled in the art could easily modify the exemplified studies to test the activity of polynucleotides (e.g., gene therapy), antibodies, agonists, and/or antagonists and fragments and variants thereof.

[1343] If a particular polypeptide of the present invention is found to be a stimulator of hematopoietic progenitors, polynucleotides and polypeptides corresponding to the gene encoding said polypeptide may be useful for the diagnosis and treatment of disorders affecting the immune system and hematopoiesis. Representative uses are described in the “Immune Activity” and “Infectious Disease” sections above, and elsewhere herein. The gene product may also be useful in the expansion of stem cells and committed progenitors of various blood lineages, and in the differentiation and/or proliferation of various cell types.

[1344] Additionally, the polynucleotides and/or polypeptides of the gene of interest and/or agonists and/or antagonists thereof, may also be employed to inhibit the proliferation and differentiation of hematopoietic cells and therefore may be employed to protect bone marrow stem cells from chemotherapeutic agents during chemotherapy. This antiproliferative effect may allow administration of higher doses of chemotherapeutic agents and, therefore, more effective chemotherapeutic treatment.

[1345] Moreover, polynucleotides and polypeptides corresponding to the gene of interest may also be useful for the treatment and diagnosis of hematopoietic related disorders such as, for example, anemia, pancytopenia, leukopenia, thrombocytopenia or leukemia since stromal cells are important in the production of cells of hematopoietic lineages. The uses include bone marrow cell ex-vivo culture, bone marrow transplantation, bone marrow reconstitution, radiotherapy or chemotherapy of neoplasia.

### Example 42

[1346] Human Dermal Fibroblast and Aortic Smooth Muscle Cell Proliferation

[1347] The polypeptide of interest is added to cultures of normal human dermal fibroblasts (NHDF) and human aortic smooth muscle cells (AoSMC) and two co-assays are performed with each sample. The first assay examines the effect of the polypeptide of interest on the proliferation of normal human dermal fibroblasts (NHDF) or aortic smooth muscle cells (AoSMC). Aberrant growth of fibroblasts or smooth muscle cells is a part of several pathological processes, including fibrosis, and restenosis. The second assay examines IL6 production by both NHDF and SMC. IL6 production is an indication of functional activation. Activated cells will have increased production of a number of cytokines and other factors, which can result in a proinflammatory or immunomodulatory outcome. Assays are run with and without co-TNFa stimulation, in order to check for costimulatory or inhibitory activity.

[1348] Briefly, on day 1, 96-well black plates are set up with 1000 cells/well (NHDF) or 2000 cells/well (AoSMC) in 100 μl culture media. NHDF culture media contains: Clonetics FB basal media, 1 mg/ml hFGF, 5 mg/ml insulin, 50 mg/ml gentamycin, 2%FBS, while AoSMC culture media contains Clonetics SM basal media, 0.5 μg/ml hEGF, 5 mg/ml insulin, 1 μg/ml hFGF, 50 mg/ml gentamycin, 50 μg/ml Amphotericin B, 5%FBS. After incubation at 37° C. for at least 4-5 hours culture media is aspirated and replaced with growth arrest media. Growth arrest media for NHDF contains fibroblast basal media, 50 mg/ml gentamycin, 2% FBS, while growth arrest media for AoSMC contains SM basal media, 50 mg/ml gentamycin, 50 μg/ml Amphotericin B, 0.4% FBS. Incubate at 37° C. until day 2.

[1349] On day 2, serial dilutions and templates of the polypeptide of interest are designed such that they always include media controls and known-protein controls. For both stimulation and inhibition experiments, proteins are diluted in growth arrest media. For inhibition experiments, TNFa is added to a final concentration of 2 ng/ml (NHDF) or 5 ng/ml (AoSMC). Add ⅓ vol media containing controls or polypeptides of the present invention and incubate at 37 degrees C./5% CO₂ until day 5.

[1350] Transfer 60 μl from each well to another labeled 96-well plate, cover with a plate-sealer, and store at 4 degrees C. until Day 6 (for IL6 ELISA). To the remaining 100 μl in the cell culture plate, aseptically add Alamar Blue in an amount equal to 10% of the culture volume (10 μl). Return plates to incubator for 3 to 4 hours. Then measure fluorescence with excitation at 530 nm and emission at 590 nm using the CytoFluor. This yields the growth stimulation/inhibition data.

[1351] On day 5, the IL6 ELISA is performed by coating a 96 well plate with 50-100 ul/well of Anti-Human IL6 Monoclonal antibody diluted in PBS, pH 7.4, incubate ON at room temperature.

[1352] On day 6, empty the plates into the sink and blot on paper towels. Prepare Assay Buffer containing PBS with 4% BSA. Block the plates with 200 ul/well of Pierce Super Block blocking buffer in PBS for 1-2 hr and then wash plates with wash buffer (PBS, 0.05% Tween-20). Blot plates on paper towels. Then add 50 μl/well of diluted Anti-Human IL-6 Monoclonal, Biotin-labeled antibody at 0.50 mg/ml. Make dilutions of IL-6 stock in media (30, 10, 3, 1, 0.3, 0 ng/ml). Add duplicate samples to top row of plate. Cover the plates and incubate for 2 hours at RT on shaker.

[1353] Plates are washed with wash buffer and blotted on paper towels. Dilute EU-labeled Streptavidin 1:1000 in Assay buffer, and add 100 μl/well. Cover the plate and incubate 1 h at RT. Plates are again washed with wash buffer and blotted on paper towels.

[1354] Add 100 μl/well of Enhancement Solution. Shake for 5 minutes. Read the plate on the Wallac DELFIA Fluorometer. Readings from triplicate samples in each assay were tabulated and averaged.

[1355] A positive result in this assay suggests AoSMC cell proliferation and that the polypeptide of the present invention may be involved in dermal fibroblast proliferation and/or smooth muscle cell proliferation. A positive result also suggests many potential uses of polypeptides, polynucleotides, agonists and/or antagonists of the polynucleotide/polypeptide of the present invention which gives a positive result. For example, inflammation and immune responses, wound healing, and angiogenesis, as detailed throughout this specification. Particularly, polypeptides of the present invention and polynucleotides of the present invention may be used in wound healing and dermal regeneration, as well as the promotion of vasculogenesis, both of the blood vessels and lymphatics. The growth of vessels can be used in the treatment of, for example, cardiovascular diseases. Additionally, antagonists of polypeptides and polynucleotides of the invention may be useful in treating diseases, disorders, and/or conditions which involve angiogenesis by acting as an anti-vascular agent (e.g., anti-angiogenesis). These diseases, disorders, and/or conditions are known in the art and/or are described herein, such as, for example, malignancies, solid tumors, benign tumors, for example hemangiomas, acoustic neuromas, neurofibromas, trachomas, and pyogenic granulomas; artheroscleric plaques; ocular angiogenic diseases, for example, diabetic retinopathy, retinopathy of prematurity, macular degeneration, corneal graft rejection, neovascular glaucoma, retrolental fibroplasia, rubeosis, retinoblastoma, uvietis and Pterygia (abnormal blood vessel growth) of the eye; rheumatoid arthritis; psoriasis; delayed wound healing; endometriosis; vasculogenesis; granulations; hypertrophic scars (keloids); nonunion fractures; scleroderma; trachoma; vascular adhesions; myocardial angiogenesis; coronary collaterals; cerebral collaterals; arteriovenous malformations; ischemic limb angiogenesis; Osler-Webber Syndrome; plaque neovascularization; telangiectasia; hemophiliac joints; angiofibroma; fibromuscular dysplasia; wound granulation; Crohn's disease; and atherosclerosis. Moreover, antagonists of polypeptides and polynucleotides of the invention may be useful in treating anti-hyperproliferative diseases and/or anti-inflammatory known in the art and/or described herein.

[1356] One skilled in the art could easily modify the exemplified studies to test the activity of polynucleotides (e.g., gene therapy), antibodies, agonists, and/or antagonists and fragments and variants thereof.

### Example 43

[1357] Cellular Adhesion Molecule (CAM) Expression on Endothelial Cells

[1358] The recruitment of lymphocytes to areas of inflammation and angiogenesis involves specific receptor-ligand interactions between cell surface adhesion molecules (CAMs) on lymphocytes and the vascular endothelium. The adhesion process, in both normal and pathological settings, follows a multi-step cascade that involves intercellular adhesion molecule-1 (ICAM-1), vascular cell adhesion molecule-1 (VCAM-1), and endothelial leukocyte adhesion molecule-1 (E-selectin) expression on endothelial cells (EC). The expression of these molecules and others on the vascular endothelium determines the efficiency with which leukocytes may adhere to the local vasculature and extravasate into the local tissue during the development of an inflammatory response. The local concentration of cytokines and growth factor participate in the modulation of the expression of these CAMs.

[1359] Briefly, endothelial cells (e.g., Human Umbilical Vein Endothelial cells (HUVECs)) are grown in a standard 96 well plate to confluence, growth medium is removed from the cells and replaced with 100 μl of 199 Medium (10% fetal bovine serum (FBS)). Samples for testing and positive or negative controls are added to the plate in triplicate (in 10 μl volumes). Plates are then incubated at 37° C. for either 5 h (selectin and integrin expression) or 24 h (integrin expression only). Plates are aspirated to remove medium and 100 μl of 0.1% paraformaldehyde-PBS(with Ca++ and Mg++) is added to each well. Plates are held at 4° C. for 30 min. Fixative is removed from the wells and wells are washed 1× with PBS(+Ca,Mg)+0.5% BSA and drained. 10 μl of diluted primary antibody is added to the test and control wells. Anti-ICAM-1-Biotin, Anti-VCAM-1-Biotin and Anti-E-selectin-Biotin are used at a concentration of 10 μg/ml (1:10 dilution of 0.1 mg/ml stock antibody). Cells are incubated at 37° C. for 30 min. in a humidified environment. Wells are washed three times with PBS(+Ca,Mg)+0.5% BSA. 20 μl of diluted ExtrAvidin-Alkaline Phosphatase (1:5,000 dilution, referred to herein as the working dilution) are added to each well and incubated at 37° C. for 30 min. Wells are washed three times with PBS(+Ca,Mg)+0.5% BSA. Dissolve 1 tablet of p-Nitrophenol Phosphate pNPP per 5 ml of glycine buffer (pH 10.4). 100 μl of pNPP substrate in glycine buffer is added to each test well. Standard wells in triplicate are prepared from the working dilution of the ExtrAvidin-Alkaline Phosphotase in glycine buffer: 1:5,000 (10⁰)>10^{-0.5}>10⁻¹>10^{-1.5} 0.5 μl of each dilution is added to triplicate wells and the resulting AP content in each well is 5.50 ng, 1.74 ng, 0.55 ng, 0.18 ng. 100 μl of pNNP reagent is then added to each of the standard wells. The plate is incubated at 37° C. for 4 h. A volume of 50 μl of 3M NaOH is added to all wells. The plate is read on a plate reader at 405 nm using the background subtraction option on blank wells filled with glycine buffer only. Additionally, the template is set up to indicate the concentration of AP-conjugate in each standard well [5.50 ng; 1.74 ng; 0.55 ng; 0.18 ng]. Results are indicated as amount of bound AP-conjugate in each sample.

### Example 44

[1360] Alamar Blue Endothelial Cells Proliferation Assay

[1361] This assay may be used to quantitatively determine protein mediated inhibition of bFGF-induced proliferation of Bovine Lymphatic Endothelial Cells (LECs), Bovine Aortic Endothelial Cells (BAECs) or Human Microvascular Uterine Myometrial Cells (UTMECs). This assay incorporates a fluorometric growth indicator based on detection of metabolic activity. A standard Alamar Blue Proliferation Assay is prepared in EGM-2MV with 10 ng /ml of bFGF added as a source of endothelial cell stimulation. This assay may be used with a variety of endothelial cells with slight changes in growth medium and cell concentration. Dilutions of the protein batches to be tested are diluted as appropriate. Serum-free medium (GIBCO SFM) without bFGF is used as a nonstimulated control and Angiostatin or TSP-1 are included as a known inhibitory controls.

[1362] Briefly, LEC, BAECs or UTMECs are seeded in growth media at a density of 5000 to 2000 cells/well in a 96 well plate and placed at 37 degrees C. overnight. After the overnight incubation of the cells, the growth media is removed and replaced with GIBCO EC-SFM. The cells are treated with the appropriate dilutions of the protein of interest or control protein sample(s) (prepared in SFM ) in triplicate wells with additional bFGF to a concentration of 10 ng/ ml. Once the cells have been treated with the samples, the plate(s) is/are placed back in the 37° C. incubator for three days. After three days 10 ml of stock alamar blue (Biosource Cat# DAL1100) is added to each well and the plate(s) is/are placed back in the 37° C. incubator for four hours. The plate(s) are then read at 530 nm excitation and 590 nm emission using the CytoFluor fluorescence reader. Direct output is recorded in relative fluorescence units.

[1363] Alamar blue is an oxidation-reduction indicator that both fluoresces and changes color in response to chemical reduction of growth medium resulting from cell growth. As cells grow in culture, innate metabolic activity results in a chemical reduction of the immediate surrounding environment. Reduction related to growth causes the indicator to change from oxidized (non-fluorescent blue) form to reduced (fluorescent red) form (i.e., stimulated proliferation will produce a stronger signal and inhibited proliferation will produce a weaker signal and the total signal is proportional to the total number of cells as well as their metabolic activity). The background level of activity is observed with the starvation medium alone. This is compared to the output observed from the positive control samples (bFGF in growth medium) and protein dilutions.

### Example 45

[1364] Detection of inhibition of a Mixed Lymphocyte Reaction

[1365] This assay can be used to detect and evaluate inhibition of a Mixed Lymphocyte Reaction (MLR) by gene products (e.g., isolated polypeptides). Inhibition of a MLR may be due to a direct effect on cell proliferation and viability, modulation of costimulatory molecules on interacting cells, modulation of adhesiveness between lymphocytes and accessory cells, or modulation of cytokine production by accessory cells. Multiple cells may be targeted by these polypeptides since the peripheral blood mononuclear fraction used in this assay includes T, B and natural killer lymphocytes, as well as monocytes and dendritic cells.

[1366] Polypeptides of interest found to inhibit the MLR may find application in diseases associated with lymphocyte and monocyte activation or proliferation. These include, but are not limited to, diseases such as asthma, arthritis, diabetes, inflammatory skin conditions, psoriasis, eczema, systemic lupus erythematosus, multiple sclerosis, glomerulonephritis, inflammatory bowel disease, crohn's disease, ulcerative colitis, arteriosclerosis, cirrhosis, graft vs. host disease, host vs. graft disease, hepatitis, leukemia and lymphoma.

[1367] Briefly, PBMCs from human donors are purified by density gradient centrifugation using Lymphocyte Separation Medium (LSM®, density 1.0770 g/ml, Organon Teknika Corporation, West Chester, Pa.). PBMCs from two donors are adjusted to 2×10⁶ cells/ml in RPMI-1640 (Life Technologies, Grand Island, N.Y.) supplemented with 10% FCS and 2 mM glutamine. PBMCs from a third donor is adjusted to 2×10⁵ cells/ml. Fifty microliters of PBMCs from each donor is added to wells of a 96-well round bottom microtiter plate. Dilutions of test materials (50 μl) is added in triplicate to microtiter wells. Test samples (of the protein of interest) are added for final dilution of 1:4; rhuIL-2 (R&D Systems, Minneapolis, Minn., catalog number 202-IL) is added to a final concentration of 1 82 g/ml; anti-CD4 mAb (R&D Systems, clone 34930.11, catalog number MAB379) is added to a final concentration of 10 μg/ml. Cells are cultured for 7-8 days at 37° C. in 5% CO₂, and 1 μC of [³H] thymidine is added to wells for the last 16 hrs of culture. Cells are harvested and thymidine incorporation determined using a Packard TopCount. Data is expressed as the mean and standard deviation of triplicate determinations.

[1368] Samples of the protein of interest are screened in separate experiments and compared to the negative control treatment, anti-CD4 mAb, which inhibits proliferation of lymphocytes and the positive control treatment, IL-2 (either as recombinant material or supernatant), which enhances proliferation of lymphocytes.

[1369] One skilled in the art could easily modify the exemplified studies to test the activity of polynucleotides (e.g., gene therapy), antibodies, agonists, and/or antagonists and fragments and variants thereof.

### Example 46

[1370] Assays for Protease Activity

[1371] The following assay may be used to assess protease activity of the polypeptides of the invention.

[1372] Gelatin and casein zymography are performed essentially as described (Heusen et al., Anal. Biochem., 102:196-202 (1980); Wilson et al., Journal of Urology, 149:653-658 (1993)). Samples are run on 10% polyacryamide/0.1% SDS gels containing 1% gelain orcascin, soaked in 2.5% triton at room temperature for 1 hour, and in 0.1M glycine, pH 8.3 at 37° C. 5 to 16 hours. After staining in amido black areas of proteolysis apear as clear areas agains the blue-black background. Trypsin (Sigma T8642) is used as a positive control.

[1373] Protease activity is also determined by monitoring the cleavage of n-abenzoyl-L-arginine ethyl ester (BAEE) (Sigma B-4500. Reactions are set up in (25 mMNaPO₄,1 mM EDTA, and 1 mM BAEE), pH 7.5. Samples are added and the change in adsorbance at 260 nm is monitored on the Beckman DU-6 spectrophotometer in the time-drive mode. Trypsin is used as a positive control.

[1374] Additional assays based upon the release of acid-soluble peptides from casein or hemoglobin measured as adsorbance at 280 nm or colorimetrically using the Folin method are performed as described in Bergmeyer, et al., Methods of Enzymatic Analysis, 5 (1984). Other assays involve the solubilization of chromogenic substrates (Ward, Applied Science, 251-317 (1983).

### Example 47

[1375] Identifying Serine Protease Substrate Specificity

[1376] Methods known in the art or described herein may be used to determine the substrate specificity of the polypeptides of the present invention having serine protease activity. A preferred method of determining substrate specificity is by the use of positional scanning synthetic combinatorial libraries as described in GB 2 324 529 (incorporated herein in its entirety).

### Example 48

[1377] Ligand Binding Assays

[1378] The following assay may be used to assess ligand binding activity of the polypeptides of the invention.

[1379] Ligand binding assays provide a direct method for ascertaining receptor pharmacology and are adaptable to a high throughput format. The purified ligand for a polypeptide is radiolabeled to high specific activity (50-2000 Ci/mmol) for binding studies. A determination is then made that the process of radiolabeling does not diminish the activity of the ligand towards its polypeptide. Assay conditions for buffers, ions, pH and other modulators such as nucleotides are optimized to establish a workable signal to noise ratio for both membrane and whole cell polypeptide sources. For these assays, specific polypeptide binding is defined as total associated radioactivity minus the radioactivity measured in the presence of an excess of unlabeled competing ligand. Where possible, more than one competing ligand is used to define residual nonspecific binding.

### Example 49

[1380] Functional Assay in Xenopus Oocytes

[1381] Capped RNA transcripts from linearized plasmid templates encoding the polypeptides of the invention are synthesized in vitro with RNA polymerases in accordance with standard procedures. In vitro transcripts are suspended in water at a final concentration of 0.2 mg/mi. Ovarian lobes are removed from adult female toads, Stage V defolliculated oocytes are obtained, and RNA transcripts (10 ng/oocytc) are injected in a 50 nl bolus using a microinjection apparatus. Two electrode voltage clamps are used to measure the currents from individual Xenopus oocytes in response polypeptides and polypeptide agonist exposure. Recordings are made in Ca2+ free Barth's medium at room temperature. The Xenopus system can be used to screen known ligands and tissue/cell extracts for activating ligands.

### Example 50

[1382] Microphysiometric Assays

[1383] Activation of a wide variety of secondary messenger systems results in extrusion of small amounts of acid from a cell. The acid formed is largely as a result of the increased metabolic activity required to fuel the intracellular signaling process. The pH changes in the media surrounding the cell are very small but are detectable by the CYTOSENSOR microphysiometer (Molecular Devices Ltd., Menlo Park, Calif.). The CYTOSENSOR is thus capable of detecting the activation of polypeptide which is coupled to an energy utilizing intracellular signaling pathway.

### Example 51

[1384] Extract/Cell Supernatant Screening

[1385] A large number of mammalian receptors exist for which there remains, as yet, no cognate activating ligand (agonist). Thus, active ligands for these receptors may not be included within the ligands banks as identified to date. Accordingly, the polypeptides of the invention can also be functionally screened (using calcium, cAMP, microphysiometer, oocyte electrophysiology, etc., functional screens) against tissue extracts to identify its natural ligands. Extracts that produce positive functional responses can be sequentially subfractionated until an activating ligand is isolated and identified.

### Example 52

[1386] Calcium and cAMP Functional Assays

[1387] Seven transmembrane receptors which are expressed in HEK 293 cells have been shown to be coupled functionally to activation of PLC and calcium mobilization and/or cAMP stimulation or inhibition. Basal calcium levels in the HEK 293 cells in receptor-transfected or vector control cells were observed to be in the normal, 100 nM to 200 nM, range. HEK 293 cells expressing recombinant receptors are loaded with fura 2 and in a single day >150 selected ligands or tissue/cell extracts are evaluated for agonist induced calcium mobilization. Similarly, HEK 293 cells expressing recombinant receptors are evaluated for the stimulation or inhibition of cAMP production using standard cAMP quantitation assays. Agonists presenting a calcium transient or cAMP fluctuation are tested in vector control cells to determine if the response is unique to the transfected cells expressing receptor.

### Example 53

[1388] A TP-binding assay

[1389] The following assay may be used to assess ATP-binding activity of polypeptides of the invention.

[1390] ATP-binding activity of the polypeptides of the invention may be detected using the ATP-binding assay described in U.S. Pat. No. 5,858,719, which is herein incorporated by reference in its entirety. Briefly, ATP-binding to polypeptides of the invention is measured via photoaffinity labeling with 8-azido-ATP in a competition assay. Reaction mixtures containing 1 mg/ml of the ABC transport protein of the present invention are incubated with varying concentrations of ATP, or the non-hydrolyzable ATP analog adenyl-5′-imidodiphosphate for 10 minutes at 4° C. A mixture of 8-azido-ATP (Sigma Chem. Corp., St. Louis, Mo.) plus 8-azido-ATP (³²P-ATP) (5 mCi/μmol, ICN, Irvine Calif.) is added to a final concentration of 100 μM and 0.5 ml aliquots are placed in the wells of a porcelain spot plate on ice. The plate is irradiated using a short wave 254 nm UV lamp at a distance of 2.5 cm from the plate for two one-minute intervals with a one-minute cooling interval in between. The reaction is stopped by addition of dithiothreitol to a final concentration of 2 mM. The incubations are subjected to SDS-PAGE electrophoresis, dried, and autoradiographed. Protein bands corresponding to the particular polypeptides of the invention are excised, and the radioactivity quantified. A decrease in radioactivity with increasing ATP or adenly-5′-imidodiphosphate provides a measure of ATP affinity to the polypeptides.

### Example 54

[1391] Small Molecule Screening

[1392] This invention is particularly useful for screening therapeutic compounds by using the polypeptides of the invention, or binding fragments thereof, in any of a variety of drug screening techniques. The polypeptide or fragment employed in such a test may be affixed to a solid support, expressed on a cell surface, free in solution, or located intracellularly. One method of drug screening utilizes eukaryotic or prokaryotic host cells which are stably transformed with recombinant nucleic acids expressing the polypeptide or fragment. Drugs are screened against such transformed cells in competitive binding assays. One may measure, for example, the formulation of complexes between the agent being tested and polypeptide of the invention.

[1393] Thus, the present invention provides methods of screening for drugs or any other agents which affect activities mediated by the polypeptides of the invention. These methods comprise contacting such an agent with a polypeptide of the invention or fragment thereof and assaying for the presence of a complex between the agent and the polypeptide or fragment thereof, by methods well known in the art. In such a competitive binding assay, the agents to screen are typically labeled. Following incubation, free agent is separated from that present in bound form, and the amount of free or uncomplexed label is a measure of the ability of a particular agent to bind to the polypeptides of the invention.

[1394] Another technique for drug screening provides high throughput screening for compounds having suitable binding affinity to the polypeptides of the invention, and is described in great detail in European Patent Application 84/03564, published on Sep. 13, 1984, which is herein incorporated by reference in its entirety. Briefly stated, large numbers of different small molecule test compounds are synthesized on a solid substrate, such as plastic pins or some other surface. The test compounds are reacted with polypeptides of the invention and washed. Bound polypeptides are then detected by methods well known in the art. Purified polypeptides are coated directly onto plates for use in the aforementioned drug screening techniques. In addition, non-neutralizing antibodies may be used to capture the peptide and immobilize it on the solid support.

[1395] This invention also contemplates the use of competitive drug screening assays in which neutralizing antibodies capable of binding polypeptides of the invention specifically compete with a test compound for binding to the polypeptides or fragments thereof. In this manner, the antibodies are used to detect the presence of any peptide which shares one or more antigenic epitopes with a polypeptide of the invention.

### Example 55

[1396] Phosphorylation Assay

[1397] In order to assay for phosphorylation activity of the polypeptides of the invention, a phosphorylation assay as described in U.S. Pat. No. 5,958,405 (which is herein incorporated by reference) is utilized. Briefly, phosphorylation activity may be measured by phosphorylation of a protein substrate using gamma-labeled ³²P-ATP and quantitation of the incorporated radioactivity using a gamma radioisotope counter. The polypeptides of the invention are incubated with the protein substrate, ³²P-ATP, and a kinase buffer. The ³²p incorporated into the substrate is then separated from free ³²P-ATP by electrophoresis, and the incorporated ³²p is counted and compared to a negative control. Radioactivity counts above the negative control are indicative of phosphorylation activity of the polypeptides of the invention.

### Example 56

[1398] Detection of Phosphorylation Activity (Activation) of the Polypeptides of the Invention in the Presence of Polypeptide Ligands

[1399] Methods known in the art or described herein may be used to determine the phosphorylation activity of the polypeptides of the invention. A preferred method of determining phosphorylation activity is by the use of the tyrosine phosphorylation assay as described in U.S. Pat. No. 5,817,471 (incorporated herein by reference).

### Example 57

[1400] Identification Of Signal Transduction Proteins That Interact With Polypeptides Of The Present Invention

[1401] The purified polypeptides of the invention are research tools for the identification, characterization and purification of additional signal transduction pathway proteins or receptor proteins. Briefly, labeled receptor PTK polypeptide is useful as a reagent for the purification of molecules with which it interacts. In one embodiment of affinity purification, receptor PTK polypeptide is covalently coupled to a chromatography column. Cell-free extract derived from putative target cells, such as carcinoma tissues, is passed over the column, and molecules with appropriate affinity bind to the receptor PTK polypeptides, or specific phosphotyrosine-recognition domains thereof. The receptor PTK polypeptide interacting protein-complex is recovered from the column, dissociated, and the recovered molecule subjected to N-terminal protein sequencing. This amino acid sequence is then used to identify the captured molecule or to design degenerate oligonucleotide probes for cloning the relevant gene from an appropriate cDNA library.

### Example 58

[1402] IL-6 Bioassay

[1403] To test the proliferative effects of the polypeptides of the invention, the IL-6 Bioassay as described by Marz et al. is utilized (Proc. Natl. Acad. Sci., U.S.A., 95:3251-56 (1998), which is herein incorporated by reference). Briefly, IL-6 dependent B9 murine cells are washed three times in IL-6 free medium and plated at a concentration of 5,000 cells per well in 50 μl, and 50 μl of the IL-6-like polypeptide is added. After 68 hrs. at 37° C., the number of viable cells is measured by adding the tetrazolium salt thiazolyl blue (MTT) and incubating for a further 4 hrs. at 37° C. B9 cells are lysed by SDS and optical density is measured at 570 nm. Controls containing IL-6 (positive) and no cytokine (negative) are utilized. Enhanced proliferation in the test sample(s) relative to the negative control is indicative of proliferative effects mediated by polypeptides of the invention.

### Example 59

[1404] Support of Chicken Embryo Neuron Survival

[1405] To test whether sympathetic neuronal cell viability is supported by polypeptides of the invention, the chicken embryo neuronal survival assay of Senaldi et al is utilized (Proc. Natl. Acad. Sci., U.S.A., 96:11458-63 (1998), which is herein incorporated by reference). Briefly, motor and sympathetic neurons are isolated from chicken embryos, resuspended in L15 medium (with 10% FCS, glucose, sodium selenite, progesterone, conalbumin, putrescine, and insulin; Life Technologies, Rockville, Md.) and Dulbecco's modified Eagles medium [with 10% FCS, glutamine, penicillin, and 25 mM Hepes buffer (pH 7.2); Life Technologies, Rockville, Md.], respectively, and incubated at 37° C. in 5% CO₂ in the presence of different concentrations of the purified IL-6-like polypeptide, as well as a negative control lacking any cytokine. After 3 days, neuron survival is determined by evaluation of cellular morphology, and through the use of the colorimetric assay of Mosmann (Mossman, T., J. Immunol. Methods, 65:55-63 (1983)). Enhanced neuronal cell viability as compared to the controls lacking cytokine is indicative of the ability of the inventive purified IL-6-like polypeptide(s) to enhance the survival of neuronal cells.

### Example 60

[1406] Assay for Phosphatase Activity

[1407] The following assay may be used to assess serine/threonine phosphatase (PTPase) activity of the polypeptides of the invention.

[1408] In order to assay for serine/threonine phosphatase (PTPase) activity, assays can be utilized which are widely known to those skilled in the art. For example, the serine/threonine phosphatase (PSPase) activity is measured using a PSPase assay kit from New England Biolabs, Inc. Myelin basic protein (MyBP), a substrate for PSPase, is phosphorylated on serine and threonine residues with cAMP-dependent Protein Kinase in the presence of [³²P]ATP. Protein serine/threonine phosphatase activity is then determined by measuring the release of inorganic phosphate from 32P-labeled MyBP.

### Example 61

[1409] Interaction of Serine/Threonine Phosphatases with other Proteins

[1410] The polypeptides of the invention with serine/threonine phosphatase activity as determined in Example 60 are research tools for the identification, characterization and purification of additional interacting proteins or receptor proteins, or other signal transduction pathway proteins. Briefly, labeled polypeptide(s) of the invention is useful as a reagent for the purification of molecules with which it interacts. In one embodiment of affinity purification, polypeptide of the invention is covalently coupled to a chromatography column. Cell-free extract derived from putative target cells, such as neural or liver cells, is passed over the column, and molecules with appropriate affinity bind to the polypeptides of the invention. The polypeptides of the invention-complex is recovered from the column, dissociated, and the recovered molecule subjected to N-terminal protein sequencing. This amino acid sequence is then used to identify the captured molecule or to design degenerate oligonucleotide probes for cloning the relevant gene from an appropriate cDNA library.

### Example 62

[1411] Assaying for Heparanase Activity

[1412] In order to assay for heparanase activity of the polypeptides of the invention, the heparanase assay described by Vlodavsky et al is utilized (Vlodavsky, I., et al., Nat. Med., 5:793-802 (1999)). Briefly, cell lysates, conditioned media or intact cells (1×10⁶ cells per 35-mm dish) are incubated for 18 hrs at 37° C., pH 6.2-6.6, with ³⁵S-labeled ECM or soluble ECM derived peak I proteoglycans. The incubation medium is centrifuged and the supernatant is analyzed by gel filtration on a Sepharose CL-6B column (0.9×30 cm). Fractions are eluted with PBS and their radioactivity is measured. Degradation fragments of heparan sulfate side chains are eluted from Sepharose 6B at 0.5<Kₐᵥ<0.8 (peak II). Each experiment is done at least three times. Degradation fragments corresponding to “peak II,” as described by Vlodavsky et al., is indicative of the activity of the polypeptides of the invention in cleaving heparan sulfate.

### Example 63

[1413] Immobilization of Biomolecules

[1414] This example provides a method for the stabilization of polypeptides of the invention in non-host cell lipid bilayer constucts (see, e.g., Bieri et al., Nature Biotech 17:1105-1108 (1999), hereby incorporated by reference in its entirety herein) which can be adapted for the study of polypeptides of the invention in the various functional assays described above. Briefly, carbohydrate-specific chemistry for biotinylation is used to confine a biotin tag to the extracellular domain of the polypeptides of the invention, thus allowing uniform orientation upon immobilization. A 50 uM solution of polypeptides of the invention in washed membranes is incubated with 20 mM NaIO4 and 1.5 mg/ml (4 mM) BACH or 2 mg/ml (7.5 mM) biotin-hydrazide for 1 hr at room temperature (reaction volume, 150 ul). Then the sample is dialyzed (Pierce Slidealizer Cassett, 10 kDa cutoff; Pierce Chemical Co., Rockford Ill.) at 4 C. first for 5 h, exchanging the buffer after each hour, and finally for 12 h against 500 ml buffer R (0.15 M NaCl, 1 mM MgC12, 10 mM sodium phosphate, pH7). Just before addition into a cuvette, the sample is diluted 1:5 in buffer ROG50 (Buffer R supplemented with 50 mM octylglucoside).

### Example 64

[1415] TAQMAN

[1416] Quantitative PCR (QPCR). Total RNA from cells in culture are extracted by Trizol separation as recommended by the supplier (LifeTechnologies). (Total RNA is treated with DNase I (Life Technologies) to remove any contaminating genomic DNA before reverse transcription.) Total RNA (50 ng) is used in a one-step, 50 ul, RT-QPCR, consisting of Taqman Buffer A (Perkin-Elmer; 50 mM KCl/10 mM Tris, pH 8.3), 5.5 mM MgCl₂, 240 μM each dNTP, 0.4 units RNase inhibitor(Promega), 8%glycerol, 0.012% Tween-20, 0.05% gelatin, 0.3 uM primers, 0.1 uM probe, 0.025 units Amplitaq Gold (Perkin-Elmer) and 2.5 units Superscript II reverse transcriptase (Life Technologies). As a control for genomic contamination, parallel reactions are setup without reverse transcriptase. The relative abundance of (unknown) and 18S RNAs are assessed by using the Applied Biosystems Prism 7700 Sequence Detection System (Livak, K. J., Flood, S. J., Marmaro, J., Giusti, W. & Deetz, K. (1995) PCR Methods Appl. 4, 357-362). Reactions are carried out at 48° C. for 30 min, 95° C. for 10 min, followed by 40 cycles of 95° C. for 15s, 60° C. for 1 min. Reactions are performed in triplicate.

[1417] Primers (f & r) and FRET probes sets are designed using Primer Express Software (Perkin-Elmer). Probes are labeled at the 5′-end with the reporter dye 6-FAM and on the 3′-end with the quencher dye TAMRA (Biosource International, Camarillo, Calif. or Perkin-Elmer).

### Example 65

[1418] Assays for Metalloproteinase Activity

[1419] Metalloproteinases (EC 3.4.24.-) are peptide hydrolases which use metal ions, such as Zn²⁺, as the catalytic mechanism. Metalloproteinase activity of polypeptides of the present invention can be assayed according to the following methods.

[1420] Proteolysis of Alpha-2-macroglobulin

[1421] To confirm protease activity, purified polypeptides of the invention are mixed with the substrate alpha-2-macroglobulin (0.2 unit/ml; Boehringer Mannheim, Germany) in 1> assay buffer (50 mM HEPES, pH 7.5, 0.2 M NaCl, 10 mM CaCl₂, 25 μM ZnCl₂ and 0.05% Brij-35) and incubated at 37° C. for 1-5 days. Trypsin is used as positive control. Negative controls contain only alpha-2-macroglobulin in assay buffer. The samples are collected and boiled in SDS-PAGE sample buffer containing 5% 2-mercaptoethanol for 5-min, then loaded onto 8% SDS-polyacrylamide gel. After electrophoresis the proteins are visualized by silver staining. Proteolysis is evident by the appearance of lower molecular weight bands as compared to the negative control.

[1422] Inhibition of Alpha-2-macroglobulin Proteolysis by Inhibitors of Metalloproteinases

[1423] Known metalloproteinase inhibitors (metal chelators (EDTA, EGTA, AND HgCl₂), peptide metalloproteinase inhibitors (TIMP-1 and TIMP-2), and commercial small molecule MMP inhibitors) are used to characterize the proteolytic activity of polypeptides of the invention. The three synthetic MMP inhibitors used are: MMP inhibitor I, [IC₅₀=1.0 μM against MMP-1 and MMP-8; IC₅₀=30 μM against MMP-9; IC₅₀=150 μM against MMP-3]; MMP-3 (stromelysin-1) inhibitor I [IC₅₀=5 μM against MMP-3], and MMP-3 inhibitor II [Kᵢ=130 nM against MMP-3]; inhibitors available through Calbiochem, catalog # 444250, 444218, and 444225, respectively). Briefly, different concentrations of the small molecule MMP inhibitors are mixed with purified polypeptides of the invention (50 kg/ml) in 22.9 μl of 1× HEPES buffer (50 mM HEPES, pH 7.5, 0.2 M NaCl, 10 mM CaCl₂, 25 μM ZnCl₂ and 0.05%Brij-35) and incubated at room temperature (24° C.) for 2-hr, then 7.1 μl of substrate alpha-2-macroglobulin (0.2 unit/ml) is added and incubated at 37° C. for 20-hr. The reactions are stopped by adding 4× sample buffer and boiled immediately for 5 minutes. After SDS-PAGE, the protein bands are visualized by silver stain.

[1424] Synthetic Fluorogenic Peptide Substrates Cleavage Assay

[1425] The substrate specificity for polypeptides of the invention with demonstrated metalloproteinase activity can be determined using synthetic fluorogenic peptide substrates (purchased from BACHEM Bioscience Inc). Test substrates include, M-1985, M-2225, M-2105, M-2110, and M-2255. The first four are MMP substrates and the last one is a substrate of tumor necrosis factor-α (TNF-α) converting enzyme (TACE). All the substrates are prepared in 1:1 dimethyl sulfoxide (DMSO) and water. The stock solutions are 50-500 μM. Fluorescent assays are performed by using a Perkin Elmer LS 50B luminescence spectrometer equipped with a constant temperature water bath. The excitation λ is 328 nm and the emission λ is 393 nm. Briefly, the assay is carried out by incubating 176 μl 1× HEPES buffer (0.2 M NaCl, 10 mM CaCl₂, 0.05% Brij-35 and 50 mM HEPES, pH 7.5) with 4 μl of substrate solution (50 μM) at 25° C. for 15 minutes, and then adding 20 μl of a purified polypeptide of the invention into the assay cuvett. The final concentration of substrate is 1 μM. Initial hydrolysis rates are monitored for 30-min.

### Example 66

[1426] Characterization of the cDNA Contained in a Deposited Plasmid

[1427] The size of the cDNA insert contained in a deposited plasmid may be routinely determined using techniques known in the art, such as PCR amplification using synthetic primers hybridizable to the 3′ and 5′ ends of the cDNA sequence. For example, two primers of 17-30 nucleotides derived from each end of the cDNA (i.e., hybridizable to the absolute 5′ nucleotide or the 3′ nucleotide end of the sequence of SEQ ID NO:X, respectively) are synthesized and used to amplify the cDNA using the deposited cDNA plasmid as a template. The polymerase chain reaction is carried out under routine conditions, for instance, in 25 ul of reaction mixture with 0.5 ug of the above cDNA template. A convenient reaction mixture is 1.5-5 mM MgCl₂, 0.01% (w/v) gelatin, 20 uM each of dATP, dCTP, dGTP, dTTP, 25 pmol of each primer and 0.25 Unit of Taq polymerase. Thirty five cycles of PCR (denaturation at 94 degree C. for 1 min; annealing at 55 degree C. for 1 min; elongation at 72 degree C. for 1 min) are performed with a Perkin-Elmer Cetus automated thermal cycler. The amplified product is analyzed by agarose gel electrophoresis. The PCR product is verified to be the selected sequence by subcloning and sequencing the DNA product.

[1428] Use of the above methodologies and/or other methodologies known in the art generates fragments from the clone corresponding to the approximate fragments described in Table 8, below. Accordingly, Table 8 provides a physical characterization of certain clones encompassed by the invention. The first column provides the unique clone identifier, “Clone ID NO:Z”, for cDNA clones of the invention, as described in Table 1A. The second column provides the approximate size of the cDNA insert contained in the corresponding cDNA clone.

TABLE 8

| | |
|---|---|
| | cDNA |
| Clone ID | Insert |
| NO: Z | Size: |

No entry.

[1429] It will be clear that the invention may be practiced otherwise than as particularly described in the foregoing description and examples. Numerous modifications and variations of the present invention are possible in light of the above teachings and, therefore, are within the scope of the appended claims.

[1430] The entire disclosure of each document cited (including patents, patent applications, journal articles, abstracts, laboratory manuals, books, or other disclosures) in the Background of the Invention, Detailed Description, and Examples is hereby incorporated herein by reference. In addition, the CD-R copy of the sequence listing submitted herewith and the corresponding computer readable form are both incorporated herein by reference in their entireties. The specification and Sequence Listing of each of the following U.S. applications are herein incorporated by reference in their entirety: Application No. 60/179,065, filed on Jan. 31, 2000; Application No. 60/180,628, filed on Feb. 4, 2000; Application No. 60/214,886, filed on Jun. 28, 2000; Application No. 60/217,487, filed on Jul. 11, 2000; Application No. 60/225,758, filed on Aug. 14, 2000; Application No. 60/220,963, filed on Jul. 26, 2000; Application No. 60/217,496, filed on Jul. 11, 2000; Application No. 60/225,447, filed on Aug. 14, 2000; Application No. 60/218,290, filed on Jul. 14, 2000; Application No. 60/225,757, filed on Aug, 14, 2000; Application No. 60/226,868, filed on Aug. 22, 2000; Application No. 60/216,647, filed on Jul. 7, 2000; Application No. 60/225,267, filed on Aug. 14, 2000; Application No. 60/216,880, filed on Jul. 7, 2000; Application No. 60/225,270, filed on Aug. 14, 2000; Application No. 60/251,869, filed on Dec. 8, 2000; Application No. 60/235,834, filed on Sep. 27, 2000; Application No. 60/234,274, filed on Sep. 21, 2000; Application No. 60/234,223, filed on Sep. 21, 2000; Application No. 60/228,924, filed on Aug. 30, 2000; Application No. 60/224,518, filed on Aug. 14, 2000; Application No. 60/236,369, filed on Sep. 29, 2000; Application No. 60/224,519, filed on Aug. 14, 2000; Application No. 60/220,964, filed on Jul. 26, 2000; Application No. 60/241,809, filed on Oct. 20, 2000; Application No. 60/249,299, filed on Nov. 17, 2000; Application No. 60/236,327, filed on Sep. 29, 2000; Application No. 60/241,785, filed on Oct. 20, 2000; Application No. 60/244,617, filed on Nov. 1, 2000; Application No. 60/225,268, filed on Aug. 14, 2000; Application No. 60/236,368, filed on Sep. 29, 2000; Application No. 60/251,856, filed on Dec. 8, 2000; Application No. 60/251,868, filed on Dec. 8, 2000; Application No. 60/229,344, filed on Sep. 1, 2000; Application No. 60/234,997, filed on Sep. 25, 2000; Application No. 60/229,343, filed on Sep. 1, 2000; Application No. 60/229,345, filed on Sep. 1, 2000; Application No. 60/229,287, filed on Sep. 1, 2000; Application No. 60/229,513, filed on Sep. 5, 2000; Application No. 60/231,413, filed on Sep. 8, 2000; Application No. 60/229,509, filed on Sep. 5, 2000; Application No. 60/236,367, filed on Sep. 29, 2000; Application No. 60/237,039, filed on Oct. 2, 2000; Application No. 60/237,038, filed on Oct. 2, 2000; Application No. 60/236,370, filed on Sep. 29, 2000; Application No. 60/236,802, filed on Oct. 2, 2000; Application No. 60/237,037, filed on Oct. 2, 2000; Application No. 60/237,040, filed on Oct. 2, 2000; Application No. 60/240,960, filed on Oct. 20, 2000; Application No. 60/239,935, filed on Oct. 14, 2000; Application No. 60/239,937, filed on Oct. 13, 2000; Application No. 60/241,787, filed on Oct. 20, 2000; Application No. 60/246,474, filed on Nov. 8, 2000; Application No. 60/246,532, filed on Nov. 8, 2000; Application No. 60/249,216, filed on Nov. 17, 2000; Application No. 60/249,210, filed on Nov. 17, 2000; Application No. 60/226,681, filed on Aug. 22, 2000; Application No. 60/225,759, filed on Aug. 14, 2000; Application No. 60/225,213, filed on Aug. 14, 2000; Application No. 60/227,182, filed on Aug. 22, 2000; Application No. 60/225,214, filed on Aug. 14, 2000; Application No. 60/235,836, filed on Sep. 27, 2000; Application No. 60/230,438, filed on Sep. 6, 2000; Application No. 60/215,135, filed on Jun. 30, 2000; Application No. 60/225,266, filed on Aug. 14, 2000; Application No. 60/249,218, filed on Nov. 17, 2000; Application No. 60/249,208, filed on Nov. 17, 2000; Application No. 60/249,213, filed on Nov. 17, 2000; Application No. 60/249,212, filed on Nov. 17, 2000; Application No. 60/249,207, filed on Nov. 17, 2000; Application No. 60/249,245, filed on Nov. 17, 2000; Application No. 60/249,244, filed on Nov. 17, 2000; Application No. 60/249,217, filed on Nov. 17, 2000; Application No. 60/249,211, filed on Nov. 17, 2000; Application No. 60/249,215, filed on Nov. 17, 2000; Application No. 60/249,264, filed on Nov. 17, 2000; Application No. 60/249,214, filed on Nov. 17, 2000; Application No. 60/249,297, filed on Nov. 17, 2000; Application No. 60/232,400, filed on Sep. 14, 2000; Application No. 60/231,242, filed on Sep. 8, 2000; Application No. 60/232,081, filed on Sep. 8, 2000; Application No. 60/232,080, filed on Sep. 8, 2000; Application No. 60/231,414, filed on Sep. 8, 2000; Application No. 60/231,244, filed on Sep. 8, 2000; Application No. 60/233,064, filed on Sep. 14, 2000; Application No. 60/233,063, filed on Sep. 14, 2000; Application No. 60/232,397, filed on Sep. 14, 2000; Application No. 60/232,399, filed on Sep. 14, 2000; Application No. 60/232,401, filed on Sep. 14, 2000; Application No. 60/241,808, filed on Oct. 20, 2000; Application No. 60/241,826, filed on Oct. 20, 2000; Application No. 60/241,786, filed on Oct. 20, 2000; Application No. 60/241,221, filed on Oct. 20, 2000; Application No. 60/246,475, filed on Nov. 8, 2000; Application No. 60/231,243, filed on Sep. 8, 2000; Application No. 60/233,065, filed on Sep. 14, 2000; Application No. 60/232,398, filed on Sep. 14, 2000; Application No. 60/234,998, filed on Sep. 25, 2000; Application No. 60/246,477, filed on Nov. 8, 2000; Application No. 60/246,528, filed on Nov. 8, 2000; Application No. 60/246,525, filed on Nov. 8, 2000; Application No. 60/246,476, filed on Nov. 8, 2000; Application No. 60/246,526, filed on Nov. 8, 2000; Application No. PT172, filed on Nov. 17, 2000; Application No. 60/246,527, filed on Nov. 8, 2000; Application No. 60/246,523, filed on Nov. 8, 2000; Application No. 60/246,524, filed on Nov. 8, 2000; Application No. 60/246,478, filed on Nov. 8, 2000; Application No. 60/246,609, filed on Nov. 8, 2000; Application No. 60/246,613, filed on Nov. 8, 2000; Application No. 60/249,300, filed on Nov. 17, 2000; Application No. 60/249,265, filed on Nov. 17, 2000; Application No. 60/246,610, filed on No. 8, -2000; Application No. 60/246,611, filed on Nov. 8, 2000; Application No. 60/230,437, filed on Sep. 6, 2000; Application No. 60/251,990, filed on Dec. 8, 2000; Application No. 60/251,988, filed on Dec. 5, 2000; Application No. 60/251,030, filed on Dec. 5, 2000; Application No. 60/251,479, filed on Dec. 6, 2000; Application No. PJ005, filed on Dec. 5, 2000; Application No. PJ006, filed on Dec. 1, 2000; Application No. 60/251,989, filed on Dec. 8, 2000; Application No. 60/250,391, filed on Dec. 1, 2000; and Application No. 60/254,097, filed on Dec. 11, 2000.

[1431] Moreover, the microfiche copy and the corresponding computer readable form of the Sequence Listing of U.S. Application Serial No. 60/179,065, and the hard copy of and the corresponding computer readable form of the Sequence Listing of U.S. Application Serial No. 60/180,628 are also incorporated herein by reference in their entireties.

The application's sequence listing, which the Patent Office published only in electronic form, follows.

SEQUENCE LISTING (1198 sequences)

SEQ ID NO: 1 - DNA, 733 bp, Homo sapiens
gggatccggagcccaaatcttctgacaaaactcacacatgcccaccgtgcccagcacctgaattcgagggtgcaccgtcagtcttcctcttccccccaaaacccaaggacaccctcatgatctcccggactcctgaggtcacatgcgtggtggtggacgtaagccacgaagaccctgaggtcaagttcaactggtacgtggacggcgtggaggtgcataatgccaagacaaagccgcgggaggagcagtacaacagcacgtaccgtgtggtcagcgtcctcaccgtcctgcaccaggactggctgaatggcaaggagtacaagtgcaaggtctccaacaaagccctcccaacccccatcgagaaaaccatctccaaagccaaagggcagccccgagaaccacaggtgtacaccctgcccccatcccgggatgagctgaccaagaaccaggtcagcctgacctgcctggtcaaaggcttctatccaagcgacatcgccgtggagtgggagagcaatgggcagccggagaacaactacaagaccacgcctcccgtgctggactccgacggctccttcttcctctacagcaagctcaccgtggacaagagcaggtggcagcaggggaacgtcttctcatgctccgtgatgcatgaggctctgcacaaccactacacgcagaagagcctctccctgtctccgggtaaatgagtgcgacggccgcgactctagaggat

SEQ ID NO: 2 - protein, 5 aa, Homo sapiens
  Site (3): Xaa equals any of the twenty naturally ocurring L-amino acids
WSXWS

SEQ ID NO: 3 - DNA, 86 bp, Artificial Sequence
  Primer_Bind: Synthetic sequence with 4 tandem copies of the GAS binding site found in the IRF1 promoter (Rothman et al., Immunity 1:457-468 (1994)), 18 nucleotides complementary to the SV40 early promoter, and a Xho I restriction site.
gcgcctcgagatttccccgaaatctagatttccccgaaatgatttccccgaaatgatttccccgaaatatctgccatctcaattag

SEQ ID NO: 4 - DNA, 27 bp, Artificial Sequence
  Primer_Bind: Synthetic sequence complementary to the SV40 promter; includes a Hind III restriction site.
gcggcaagctttttgcaaagcctaggc

SEQ ID NO: 5 - DNA, 271 bp, Artificial Sequence
  Protein_Bind: Synthetic promoter for use in biological assays; includes GAS binding sites found in the IRF1 promoter (Rothman et al., Immunity 1:457-468 (1994)).
ctcgagatttccccgaaatctagatttccccgaaatgatttccccgaaatgatttccccgaaatatctgccatctcaattagtcagcaaccatagtcccgcccctaactccgcccatcccgcccctaactccgcccagttccgcccattctccgccccatggctgactaattttttttatttatgcagaggccgaggccgcctcggcctctgagctattccagaagtagtgaggaggcttttttggaggcctaggcttttgcaaaaagctt

SEQ ID NO: 6 - DNA, 32 bp, Artificial Sequence
  Primer_Bind: Synthetic primer complementary to human genomic EGR-1 promoter sequence (Sakamoto et al., Oncogene 6:867-871 (1991)); includes a Xho I restriction site.
gcgctcgagggatgacagcgatagaaccccgg

SEQ ID NO: 7 - DNA, 31 bp, Artificial Sequence
  Primer_Bind: Synthetic primer complementary to human genomic EGR-1 promoter sequence (Sakamoto et al., Oncogene 6:867-871 (1991)); includes a Hind III restriction site.
gcgaagcttcgcgactccccggatccgcctc

SEQ ID NO: 8 - DNA, 12 bp, Homo sapiens
ggggactttccc

SEQ ID NO: 9 - DNA, 73 bp, Artificial Sequence
  Primer_Bind: Synthetic primer with 4 tandem copies of the NF-KB binding site (GGGGACTTTCCC), 18 nucleotides complementary to the 5' end of the SV40 early promoter sequence, and a XhoI restriction site.
gcggcctcgaggggactttcccggggactttccggggactttccgggactttccatcctgccatctcaattag

SEQ ID NO: 10 - DNA, 256 bp, Artificial Sequence
  Protein_Bind: Synthetic promoter for use in biological assays; includes NF-KB binding sites.
ctcgaggggactttcccggggactttccggggactttccgggactttccatctgccatctcaattagtcagcaaccatagtcccgcccctaactccgcccatcccgcccctaactccgcccagttccgcccattctccgccccatggctgactaattttttttatttatgcagaggccgaggccgcctcggcctctgagctattccagaagtagtgaggaggcttttttggaggcctaggcttttgcaaaaagctt

SEQ ID NO: 11 - DNA, 89 bp, Homo sapiens
tgcggccgcatgtataagcttgctccgagtctagagtcgactgggccgaggcggccgacatgttttttttttttttttttttttttttt

SEQ ID NO: 12 - DNA, 485 bp, Homo sapiens
  SITE (430): n equals a,t,g, or c
  SITE (448): n equals a,t,g, or c
  SITE (454): n equals a,t,g, or c
gcaaggttagattcaagaagttcaatactgagtataatatcctgttgtataaacatgtcattacaaggtgatgagcactctattcagatgatttaatctgtgtaatctaattaacatagcaaagaggttcaatgaatgtatttagaaaaaaaattagctggtcaaataatagataaattgttaccctaagtatgatgtattagttgtccattgctatgtaacaaattaccccaaaacatagcaacttagtgcaataaacatgtattatttcatgcagtttctgagggcctggaatctgggagcagtttagccagtggctgtggcttaggtctcccacaatgttgcaggcaakttgttggctgggattggacaatctgcttycagatctccaaattattctctccatcaycaggaggccctaagttaccancaccctccatttttcctngggaanaaaattaagaaagaaattaatgtgggcttaa

SEQ ID NO: 13 - DNA, 331 bp, Homo sapiens
  SITE (271): n equals a,t,g, or c
  SITE (275): n equals a,t,g, or c
  SITE (282): n equals a,t,g, or c
agaaaggaaagagattcttctggccagcaagtgaaaagctgttcttttggcaggagtgtgtttagctctgggacctggagcggctgctatagaaagacagaggcatcgggagttcttgaagacacacatctggtgggggttcttggcattgargaagatgcatgatttccctaaagaccctgggagcgtttcctcttccccaggcagctttcccaggccgcacctccatgtcggagtcagtgggggtgagaacggggtacccaagctccanccangcttgantgggttgggacttcctgtcggtgttcacacagcctccttttctggtgga

SEQ ID NO: 14 - DNA, 484 bp, Homo sapiens
  SITE (451): n equals a,t,g, or c
  SITE (452): n equals a,t,g, or c
gagatttctttttattctgtttactcttcttggtatgcacgtacctgaatattaaggatattttatgaagtcatgacattaccagattaatgttggttttgttttaaggtactttctgactgctcgggttaattcctacagacgattctggtaaagaatagcctttaagttttaaaagtgttgacttatttcagatgtcttaataaagttaacttccagttattacatgtaacgtatataaagctctcattttcctttattctcgttaattgtttgcataacaaattcaaagggaaatttgcttggcagaratcagatagcagaratgaratttaaaaacaggtwatttggctactarcctgggaatttgaarawtccaagtttgcatccatgtktatcmcttaacatttctgtcctatctktaawtggraataacaccyacytgataggnnggttacatgatcttggccacctcaagttctct

SEQ ID NO: 15 - DNA, 619 bp, Homo sapiens
  SITE (4): n equals a,t,g, or c
  SITE (584): n equals a,t,g, or c
  SITE (603): n equals a,t,g, or c
gtcngagttggcttacctatcttttgtgcccgttgagggctggcattttaggatgtggagtcctattttggagcagtgagccagggcttgctctgggcatcttggcatggatctttctcctgggatcatagtggttacagacagccatggtcacagagacatggggtacaggcctggccccaccactcactggctgtgtgatctaggcagattctgtaagtattccaggctggcagcttggctgatacagaaagcacctcccactgggcctggggcctagtaggtgttcagaaggtggcagtgcattttcccagcacataccgatagattctcattcatttctctctctctctcttacagtcatttgctgaggattttggtatcttctattcaaggttcacttctacaaacacaaagtactcctgcttcattttcggaaacacatagsctaacaccaacacaccctycaacataagggtcttttttggtttggttttaaataaacttaattttagagcaaggttamatttacagaaatactgcaaagaagctgggcacggtgggccccgcctgkgatcccacantttgggaagccaagcttgnggatcacctaaggcag

SEQ ID NO: 16 - DNA, 401 bp, Homo sapiens
  SITE (401): n equals a,t,g, or c
gatctactaagattgtcctgagkgagagtcttatctcctgtasagagagagcagaaattgtggaaaaacagagacaagctctgatcatgtgagtggctgacctgcaatgaaacgtgcctgcacagcctcaccaggtgtctactgttaaagtgagggcatttattggaaaagaatgggacactgtgacttggaatggggatgtgtgggaggaccctgacaaagctgggaacactgagtttgtaaactctgatgaaacttttttgccagaagaaacagcttcccatccccagtagtggcaaccaccactccctgacccttgctgccatcagcctttccacctttgtctgaggagataaacccttgcactacctgaggcaaaagtgatggcctgccttgaaggn

SEQ ID NO: 17 - DNA, 259 bp, Homo sapiens
caaagataacctagaactcctcctgatgaaccattacatcaaaccagggctgaaaaacaacttcaaagaaacggcatttgatattgccaggaggacaagtatctatcactccttctttgtaatggtggaaggctatacaaattcttcacctcagtcttaatggttctagtaattttaggtgtctaagtaccagtggctccttcgtgcaagatataaaatattcccataagacaaagttgatttaaaacgtcttactaca

SEQ ID NO: 18 - DNA, 314 bp, Homo sapiens
cagcaatcctattctttgcttctggtaatttattaatttacattaatgtcatttaattatttacttcaggtagatttacatctgctatatttttacatgaaaaagatgaaaagccacttgaacatatctyctgtttttttaatgatctgttcttctttataggggatttttgacatcttgtgaagcagaactacaggagctcatgaaacagattgacataatggtggctcataaaaaatctgaatgggaaggacgtacacatgctctagraacttgcttgaaaatccgtgaacaggkacttaagagtctttagg

SEQ ID NO: 19 - DNA, 435 bp, Homo sapiens
  SITE (433): n equals a,t,g, or c
  SITE (434): n equals a,t,g, or c
aattcggcacgagttttgataagaattgtactgataatagcaaagatatgtaatcaacccaaacgcccaacctaactgctatgttattcctattccaatactttgcaatatatgtagctttttagaaagaggatatgttagcagggcgcagtggctcacacctgtaatcccagcactttgggaggctgaggcaggtggattgcctgaggtcaggagttagagaccagcctggacaacatggtgaaaccccgtgtctgctaaaagtacaaaaattagcagggggtggtggcaggcacctgtaatcccagctactcaggaggctgaggtaggagagtcgcttgaacccaggaggtggaggttgcagtaagccgaggtcacgccattgcactycagcctgggcgacagagcgagactccgctcaaaaaaaaaaaanna

SEQ ID NO: 20 - DNA, 166 bp, Homo sapiens
  SITE (137): n equals a,t,g, or c
gggcggcgcgcggcgtgcaggtcgcagctgtggctcgggtgctggcaggtgctggcgggactggcggggatcgcgtggactgcctcaggggcgccgcagcccgctcggcccgagggccgcctaaccgcgccgcccgncccgctcctcctcggcccgcgcccggagg

SEQ ID NO: 21 - DNA, 358 bp, Homo sapiens
  SITE (297): n equals a,t,g, or c
atgcttaccttctttaaatacacataaggaatcttctttattttcactataaatctgttataatggaaactctgattttatatttctctgtaatggagtcaactatcacctggcctatgcaggcaagtgcaaagaggtgacagtttttatttgtgccataaccacacacagctttaaatgtttttactataacatattttagaaagctaacaagctagagagagcggtgaagggctctctcagcatgttcctctctgtctgtgtgttagttttgctttactttttcctttaatctgnggctgtgtgtgtgtgtttgtgtatgtgtgtgagagagagagagccgaaagggtcttatttt

SEQ ID NO: 22 - DNA, 231 bp, Homo sapiens
caagaaatgccctttaagcacaggactacaacatatagaaacttagattagtgactgaatacgatagattcagggcatcttgaagtgcatgatttggctgaagtatagagttcataaaggctattgatggaagataaaaagttgataagaaacatgggacagatgacagaagcctgaaatgccaagtatgaactgcagactagttatgaaatgcatgcttttgttgtgagg

SEQ ID NO: 23 - DNA, 387 bp, Homo sapiens
  SITE (114): n equals a,t,g, or c
  SITE (329): n equals a,t,g, or c
  SITE (343): n equals a,t,g, or c
gagacagagtctcagtctgtcactgaggctggagtgcagtggcatgatctcggctcactgcaacttccgtctcccaggttcaaagtgattatcctgcctcagcctgtgcatggnggcctatggcgaccattggctttactttctctcttaaattgtgaagtccttgtttagattttttggggctcacctgacccttgacacctagtacactgtcctgtaccccataggataccaataataatatgtagtgcagtgataatcttcctccctgccgcctaaccaaaatgggaaacaggcaggcatagtgttgactctcatccataagggantcaggcaagctccntacacagagcaggtgtttaaaaagaatgggcaatgaaatatttt

SEQ ID NO: 24 - DNA, 397 bp, Homo sapiens
cagggctgctgggctctctgtgcctaaaagctgcttcaaacaagcagctcacattccagagctctgagagatgttgtcagcctttaacagttttctcttcgagaagacattagattctgtacaggttgcagaaacgttgtcttaaggtggctggaaggaagtgtttgaaataacacatgtgcttgtgattttggtaaccaaggaaacatgtacctgatacaaagcttcctttaaaaaatgatggtacccttctggggattgcctcagaattcacccacaggcaaggatttccaaaggggattttaaaatttaaaggtaggttcatttccaggcaactgtgttcaagagtttaaccaggggattcaccccttttaaaaatggaggattcatctctttt

SEQ ID NO: 25 - DNA, 315 bp, Homo sapiens
  SITE (309): n equals a,t,g, or c
tgtataagagagagaattagaataaatttaaatatccattaatagaagaatggctaaattatggaccaatcatactgtggaataccacacattccttaaaaaggttgaggcagtcatatgtactaacatgaaagatttccaagattggagaatggagaaaagcaaggcaggataaacgcccacctgggagtgacacagwgacagagaaacctcccccacccagggaagcagctctgcagagttggcaggwtcaggggctagtctgaacccctagcacagaacactcacctcacggaagagtggccagantgtttt

SEQ ID NO: 26 - DNA, 385 bp, Homo sapiens
  SITE (279): n equals a,t,g, or c
  SITE (298): n equals a,t,g, or c
accccgtggacccagaggttcccccgtgggatcggagcagttagaaggggaggagagggaagattgttattttgtgtcagtaagtaatccataaagtgccaacatgggaaagaaacggacaaagggaaaaactgttccaatcgatgattcctctgaaactttagaacctgtgtgcagacacattagaaaaggattggaacaaggtaatttgaaaaaggctttagtgaatgtggaatggaatatctgccmagactgtwagactgacaataaagtgaaagntaaagcttgaagaaggaancagaagaaaagccttccagtttggctgtgtctttaaatgttggccctcagggttttggcagaaatttttcaaggggcagcatgcctt

SEQ ID NO: 27 - DNA, 317 bp, Homo sapiens
  SITE (30): n equals a,t,g, or c
tcagctatttgggagactgcagtgggaggntcactgaactctggaggcagaggttgcagtgagccaagatcatttcctgcactccaggctgggtgacagagtgagactctgtctcaaaataaatagatagatggatagacagatagatagcttttaaaggtagatttttccaataaaagtaatatatgtttatggtaagttttcaaatagtataaacatgtctcctcccaatttttccagttctgaatggagaataatgraccattgttatattyctatacacaaatttctttcttgggcaaactttatataaccag

SEQ ID NO: 28 - DNA, 241 bp, Homo sapiens
  SITE (184): n equals a,t,g, or c
  SITE (208): n equals a,t,g, or c
cagagtactcactgcaggttgttcgtgggggccggtgcatggcatagggaaaggaagacaaaacaggagaagttagcagaggtagggaatggggtagagactggatcatagaaggagttgtttgccatgcttacccttaaaggctttctgagcagtcatcctgggatggacagggcagggagtngagagaccagcgagcaggtttttnttacggttcgagttagggttgaacacaggcagt

SEQ ID NO: 29 - DNA, 327 bp, Homo sapiens
cgttatccccacttcacagatgaggaaataggttccgaaaagaaacttactgaaggacacacagagggtcgagtcagagatccgctccaagccctatcttactctagtggccaccttctttttacttcacatcccatcataaaatataaaactaaacgaagttgatggttgtttaatgcgagcaatgcaggctgccaagtagaacaattaagactctgaaatagctattttgctttgactacttggcttatttaacaatctacagttactagctagatggataattgtacagcctctcaattactttaggttatgtgggcaaagcct

SEQ ID NO: 30 - DNA, 428 bp, Homo sapiens
  SITE (349): n equals a,t,g, or c
tgcaatgaaaaagtggagaccacatcaaaataacctatgccactggattcacaatgtttgagaaatatctttgcccagagtaagcactgtcaaagatagaattctgtgccctcctccttccctccacaagatttgaaagagacaaggctcacatcttggagaatttctggctccttttgacctggcagtcttgagagatgcagctcggtcagaagattgcaaggatttcctgctttcagcctgtctagaaatactacaagatgaacatcccccatatctcattatttacttcttcctaagtcaggaaacttggagacatgtgaaaattcatttcatgagtttcagtaantattttattttgagaggttgggtggtggtttgggttcctttgtttatttccctttttgagtaccgaatagattggttac

SEQ ID NO: 31 - DNA, 222 bp, Homo sapiens
aaaaactgttcatctgtgaacttttccagatgtgcaattttaaagctaatgtcacttgttttccaaattagaagctgttagcaaaatatgtcactatatcattctgctgcctagtttatgaattggaagacactgaaaagatactataaggttaccatgtccggttaaaaaattcattgacattgaaagagagaagattccacttgacagaaaaagtggact

SEQ ID NO: 32 - DNA, 209 bp, Homo sapiens
  SITE (90): n equals a,t,g, or c
tttggtttgaaaagaaagtccagggttttggtttgaaaagaaagtccaggaaacaggagaaatagctttaacgtacattatgtttttttnctttgtttttgagacgggatctcactctttctctaaggccaccatggttccctgcggcctctacctcctgggtgcaagcggtgttcctgcctcggtctcctgagtggttgggacaacag

SEQ ID NO: 33 - DNA, 363 bp, Homo sapiens
  SITE (13): n equals a,t,g, or c
  SITE (277): n equals a,t,g, or c
  SITE (282): n equals a,t,g, or c
  SITE (327): n equals a,t,g, or c
tgccccatttgtnatcatttgcacattctctctctcccactctctgcctctttctctctctctcagacttttattctctgaaccacctgagagtatgctgcacacctcatagctctctgctgccaaaccaccccatgtgtaccttttaagagttaagaaagctgttaattttgtagaccaaactcttgtaagaattatgaaataacaaattatttccaggaagtagatatttctgaatataaaacagatactgtactgtaatcatgtggggcattanttttnttaaaaaagatgatcagtgtggctttagggatctcatttcttccngtaatggcctggagaccttggtctaggaaccctctt

SEQ ID NO: 34 - DNA, 321 bp, Homo sapiens
  SITE (193): n equals a,t,g, or c
tgtacatcctaattaccgtggggtgttaaatatgcagatgctgattcagtaggtctgggataggggcctgggattcagcatttctaacaaactcccaaatgctgaagcaggtggtctttgaaccacattttaagtggcaagatttaagaagccctttaaaataccaattcctaaacactacctagagattttnatttaattagtctgtggtaggtcccaggtatcaatagtttcagagattttctaggtgattctaatgtaaagatcaagaaccactgggttaggagatctgggatttcaataattattattttggcagct

SEQ ID NO: 35 - DNA, 322 bp, Homo sapiens
  SITE (317): n equals a,t,g, or c
  SITE (321): n equals a,t,g, or c
gagagaccttgtctcaatttttaaaaaaatataaaaaaagaaaaccgtcactaaaaacacaaaattaatcaaggaagaggggagggggaaatggaataaccgagcttgcagcacacgcagcaccagtcatgcggtgagcccctctgagctggcgcctcgtgcctcagwatcaggtagactcttgttataagattacagttacccttaactgctccagagataacaacttgtaacattatggaaaccttaacttttccctttgwgatttttttttgtattttaatttttttttgtttttagaggacagggtctcactnttgnt

SEQ ID NO: 36 - DNA, 104 bp, Homo sapiens
  SITE (19): n equals a,t,g, or c
agggatgtaatactatgtnttgggtacaatgtgcactattcaggtgatggatgcactgaaagcccagacttcaccattgtgcaatatatccatgtaacacaagt

SEQ ID NO: 37 - DNA, 303 bp, Homo sapiens
cgcacccggcccattaagtggatttttaatctcacacgagctcaaggcacagctgaagaccttttaaattctgtgaaagatagtggatattcatagctagtttttaattccagacccttaatttctcttatctgtaagtcagccttgttgacttctgtctaacatttagcacctttacaaaattattcaagtcagtaaatatatatataaaaaacctatttggctttgtttcaagatttgctcatttaacctttaataatcctctttaaaatggggatgatgatgtaacagaatccctgtaac

SEQ ID NO: 38 - DNA, 389 bp, Homo sapiens
  SITE (353): n equals a,t,g, or c
  SITE (374): n equals a,t,g, or c
  SITE (383): n equals a,t,g, or c
gtcatcttcccagggctatggctctgtgtgcttagacatagtatggaattgtgctctaagcccacaggcttctccagagttaaaaggaagcaagaacatccttaagttactttttcaaaatatgcgcttcaggaggaaccaggtttccccaggagagagaggctccctgctcaatcagcacagggagttgctagcgggcaggctgcccagtgctgtggaatctccgccagcctctgggttgggggctccctcccacttcttgcttcttatggagtacatgggactgctctgctttwaagccgcgatcagagctgttgtgagcaggacaagattgcgtgatcamgaggtgcgtnggggagatgctaaggacattnttgatgtcntttgac

SEQ ID NO: 39 - DNA, 303 bp, Homo sapiens
aattcatgaattttagctaagttactctagctaaattgatcttgcagtcttgagttcaaaggctggaaacctgagctcaatctgtgttgcagtgtagaggcagaattccctcctcttaaaaagacctcaggtcttcagctgattgcatgagacccacccacattatagaggctaatcagctttacttctaaagtctactgatttaaatgttaatcacatgttaaaaaatactttccacaaaaaataacaatgatccttttaaaaagtaactagggrttaaaaaactttgtttccaataggggt

SEQ ID NO: 40 - DNA, 329 bp, Homo sapiens
  SITE (90): n equals a,t,g, or c
  SITE (244): n equals a,t,g, or c
ggcaaccctactagggtagaagtaatgaacatcagatgcttcctttagaaaggtgatttgaggagggccctaagggaggagacacttggnttctggaaagctgaaatgaaagtttattctggccaggcccagtggctcacgcctgtaaatcccagcagtttgggaggccaaggcaggcagatcatgaggccaggagttcgagaccagcctggccaacatggcgaaatcccgtctctactaaaantacaaaaattagccgggcgttgtggtgggcacctttaaccccagctactttgggaggcgaaggcaggaggatcgctttgattcct

SEQ ID NO: 41 - DNA, 338 bp, Homo sapiens
gatgtcttatgtggtaaccaagacaaaagcgattaatgggaaataccatcgtttcttgggtcgtcatttcccccgcttctatatcctgtacacaatcttcatgaaaggattgcagatgttatgggctgatgccaaaaaggctagaagaataaagacaaatatgtggaagcacaatataaagtttcatcaacttccataccgggagatggagcatttgagacagaaagccttgagccgggccatgcttctcacatcttacctgcctcctcccttgttgagacatcgtttgaagactcatacaactgtgattcaccaactggacaaggctttggcaaagc

SEQ ID NO: 42 - DNA, 321 bp, Homo sapiens
  SITE (92): n equals a,t,g, or c
cttgagtgtcataccctagccacctgactgtcaggggagcagtatgtggcacttgaggccttgggctggccatgcaggcccaccacaggtgncaaggaatcatgaaccccagctgagtcccctgcaggccttgcctaaaggagaagccagtgaatcaatgtgttacttgaacaaatatagggtctagggctggccaaaagggacagtgaagttggcttctcaggccacagtaggccttcacggtactcagcaggagaccccagcaggcagcatcagggcaggggtgctgaccatccctgacccaagcacgaggatcagaat

SEQ ID NO: 43 - DNA, 360 bp, Homo sapiens
ctcacccatatctaacagaaatccctccagcaacatccacagcacctgtaaagagccctaatgaccgtaagtggttaagagaaggggtttccttcctcaccggacctgcagcttctttttcccaccaagagacatcaggtatctaagtggctccaacaagaaggattctagaagtggcccagaaagcctctttgtttctgtgggactgcgactctcgtctacccagaggcactgaacattcagagacactggacatctacccagaaaacaccaggaaaggggatctggccacaacatgcagtcaagtatgggaagcccytgtttttctcacaggcaagagattttggttttttcaaccag

SEQ ID NO: 44 - DNA, 283 bp, Homo sapiens
ataaagtttgaattacatactatgtagcctttttatattggcttctttcacttagtaatatgcatgcaacttttctctgtgtctttttacggcttgatagctcattccttttttagcatcgaactatcctgcttttaaataaaaattatccggacacttttgtttcccataacacagccacatgaggtcctatggctatatcatacttttctggatgattatcaggtgaaagggtgtttgtaattaaagcattattacaacagggggggaaacaattttatcc

SEQ ID NO: 45 - DNA, 485 bp, Homo sapiens
  SITE (9): n equals a,t,g, or c
  SITE (312): n equals a,t,g, or c
  SITE (451): n equals a,t,g, or c
  SITE (463): n equals a,t,g, or c
atataaatnagtttcattttaagtaaactcattttgtgggatttgagatttaaaaatgaaattaattttgcacattctagtcatggttgggctctaaggcaatgttgtaaagctgtaattgtttgccttatgggaagaagtgaaaaggaattaaaatttatggtgtgtctactatgaaccaggcatgatgctgagagtttaactgtgtaatttttggcctaaatagccctgtgaagtagatattattccaactttacaggttagaaaatttgaggcacagagaggtgaaatatttgcctaaagtggaamggncaaaatttggcaatttggacttgggttcaagtgtttataactaaagcccagctccttgcatcataccctggtacctaaaagacataaaaactcacttcaggtgccatgtggaatgaaatgacggtatgacccgggcttnttgtctatgtgntccttgagaaatagtcctgttg

SEQ ID NO: 46 - DNA, 284 bp, Homo sapiens
ctggaaccccagaccagactcctgcagtttcaagcagcctcctccttctatcccggtgtaccttccatatctcagtaccaccacggggaacctcaaagactcgacaacccatttcaaaagcctggctatggaaagaagaggaaagggaggagccgcaagtttgggagaaagtgtatttgggatgctggagtgggagcctgtttgtaggagccatagggcaggcttgaagatgaatgggaaagaagatgagaggaagaggaggtgagactgagagtttcaaaagc

SEQ ID NO: 47 - DNA, 327 bp, Homo sapiens
ataaagtgagatccttagaactgtgcaagaatatgtgtcacccagctgttaactgtagtgacgcggcgtgaccacgcaggcctggagcgcgggccagccttmctgaggaggctccagtctgtactcacgtgagaccgttgaaaagaacgtggtgtttctgtgcccatcttcacactgtgtgtkkaaatttgccaaccaaaaaaagaaacggaattaagacagatgttcggcatggaatagagcttatttttagaaggrgaactgatgagcttgggaaatttgaayttttttctaccagggttaaaacaggggtttcttttctctctg

SEQ ID NO: 48 - DNA, 331 bp, Homo sapiens
  SITE (201): n equals a,t,g, or c
aaaaatcgaatctttttaaagaaattggaatctgtgaaaaacttataaggcaaaggccaggaatagaaagaaatccagggatataagccggcatttggggctgctttccctaattgcatgtcactatccaagaagagatggagagaggtttaaaaactgaggtgagcttgaaacaaatttacagagctagaacaataaaanttgaaattcagcatccatcacacttgtggataggtgtgttaggatcctcaaaatgccactgtacttttaaatgtataatatcctagctccatatctagcaccaaaaagggattagggaccagggaggttg

SEQ ID NO: 49 - DNA, 267 bp, Homo sapiens
gtagaattggttgaagtcacagcacaatagaattaagtggggcttaatgatcctctaccaaccagaggcgggtaaagggtaaccctgagagagacaagaagatgaaaccagaccagaaggtatcctgcagagggaggcaaggccagaaagtgtttttaatgtaggggaaagggagtgtttgagatttaagtgagtaatgagaaggggctgaatgtttaatttccctaattctattgttaatactttggaccatgtttctttatgagt

SEQ ID NO: 50 - DNA, 582 bp, Homo sapiens
  SITE (125): n equals a,t,g, or c
  SITE (138): n equals a,t,g, or c
  SITE (382): n equals a,t,g, or c
  SITE (402): n equals a,t,g, or c
  SITE (448): n equals a,t,g, or c
  SITE (449): n equals a,t,g, or c
tgggctgagcaggaacttgtgagattccagagccctgactacaggtgatcagcggtcagcaactccccaaagtggacaagaccaaagaggggtccattgtggatccactggtgaaagtgcagatntttggcgttcgtntagacacagcacggcaggagaccaactatgtggagaacaatggttttaatccatactgggggcagacactatgtttccgggtgctggtgcctgaacttgccatgctgcgttttgtggtaatggattatgactggaaatcccgaaatgactttattggtcagtacamcctgccttggacctgcatgcaacaaggtgagccagcccctttgacccctggccaataccccagctctggctgccttcntaatgctgtcctcctgcccnttccaggttaccgccacattcacctgctgtccaaagatggcatcannctcagcccagcttccatctttgtgtatatctgcatccaggaaggcctggagggggatgagtcctgaggtgggcatttcacgggaagggttggtatgctggctttagacggggagaaacatctggaaggatgct

SEQ ID NO: 51 - DNA, 2426 bp, Homo sapiens
  SITE (157): n equals a,t,g, or c
actccaggccctaaagggtcccggggcagcctgggaccaacgggtgctccgggacgcatgggggcccaaggagaaccgggactggctggttataatggacacaaaggcattgtgggaccccttggacctcctggaccaaaccttggctgctcctctnacaccatcgaggtctcctgcaacttcactcatggtggacagacgtgtctcaagcccatcacggcctccaaggtcgagtttgccatcagccgggtccagatgaatttcctgcacctgctaagctccgaggtgrcccagcacatcaccatccactgccttaacatgaccgtgtggcaggagggcactgggcagaccccagccaagcaggccgtacgcttccgggcctggaatggacagatttttgaagctgggggtcagttccggcccgaggtgtccatggatggctgcaaggtccaagatggccgctggcatcagacactcttcaccttccggacccaagacccccaacagctgcccatcatcagtgtggacaacctccctcctgcctcatcagggaagcagtaccgcctggaagttggacctgcgtgcttcctctgacctctgacctcgtggccactctaggcctcayggaggagggaagaggaagaggcaaggggagggtactgaggggcagatggctccaggagaggcagctcccctgcccaagggtccttgggcagaccccagctgttgtctgcccagtagaagtgggtgggggtaggaggggatagggtgtccttgggaacaatggatcccagcttagccccaaagaccaaccaaagagccagccagagtaagctggacctgcaacctgcctgagccccgtggcctctcagctctgcggccaccccgttccctccccagcttcctgcccaaagagccccacattcaagccaacttgagggaagggggcgtctcgtcagctggtccctgctagggagctattgatgtgcaatattagaaaggagacatgaaaaaaggagaaaaggaaagacagaagtgtatatatatattatttaaacaaacaaaaagaaggtgcgttactatttttttttcacccgggaaagaggtgagaggatgggaaggagcagccaggcgtgggaagcggcgagatcctcgggctgggggtgcccacgtttgctacctcccactgtgaaatcgctggtgctcacaattgtctctcacagtgtatgtgatttttttaaggaaaaaaaaaaatccctatttaagattctgaaggtgctaccattattttgccacagactttgaagaaacttttggatgtggggcatcatccgcatctttctctctcctccaaatgacaaagtttggggaatttttgaattttcctagcatcgcccttgtgctcatcaggtaatctgctaaggaggaaaaaagaaaagaaaaaaggaaaaaaaaaaaaaaaagcaaaacaaaaacaaaaacaaaaaccctaccagaaaccagaagtagagagatttaccatataacttatggactttgaaatgtctgtccttttaaggcagcagggaggcctgggtgcgasatgtttggcttggccttcacggtcctggagggaggtgaggctggccttggaaggcgtgccctggagaggtcttgggtgaaaacttgaccttgaagaaaccaatcacaaaagcggcgttgggtcagggctaggcttagaggtgaagcatcaacatggaaccatctcaggaagccgcatcgcctcttccgaggtcctcacttccaggagcctgtccttgcaagatgcaatcatcgttcctgctttttcattgtcattaaattctgtagaaacccattgtcattagctccaagtgtaaatttgggtcaaggagacagaataataatgggaatctcggagttcgacaccatagtgacgttcagcgtcctctgaattgtgctacatcagcgaacaagtcggcgcttgaattggattttgaggttattttaaccatggaattatttttatagaaggggaaaatgtatgtgaaagtctctatttgtgtatttctctcctaaagttgtgtctctttgggaattggatttgatttttattatttaatacctcactttggcccgtcccccctcccaacacttctgtatcctcgccctgccgccccagcctggacgctctgcgtggaagtgcgtgtttgtagcagctcgggcctcatctcagcgctcggatccctcctgctgccagaatccactggcctctgtctcattcttgggttttcctgctgtcttcgtttacgtctctgtccacatgtcagtgtattaaaaccccaatgggttccgtttctccttttcccctctggattttaaataaatatttaaaactgaggcaatggaaaaaaaaaaaaaaaaaaaaa

SEQ ID NO: 52 - DNA, 308 bp, Homo sapiens
ctgcaacctctgcctcctgggttcaagcgattctcctgccttggcctcccaaagtgctgggattataggtgtgagccactgcacctggccagattgacttttaaaaaacttttaattttgaaaaaattttagatccatagaagcacataaagattatatgaagagttcctgtatgcgcttaacccagctacttctgatgttaatcttgcatgaccacagtacatttgtcagaagaaattaaacataggtacaatgtgataaactacagcctttaattagattacatcagtttttctactaatgtccct

SEQ ID NO: 53 - DNA, 273 bp, Homo sapiens
  SITE (16): n equals a,t,g, or c
tctttccatttttccnttcatttgctaagtggcatgcttttaattttttaagatgaaactttttcccagcaaagtcttttccccacagtgatgctctgaaagccaggacacctagcacaggaccctgggcatagtatgcactcagtacatgtggagcatgttgatcaggaacaaaaggagtagcaaaggtcagttcctgcaaaggtgagtagataatacaggtatgactgaaaggctgcaactcaggrgtaaacattttacattcattcmagg

SEQ ID NO: 54 - DNA, 305 bp, Homo sapiens
  SITE (259): n equals a,t,g, or c
  SITE (297): n equals a,t,g, or c
agggtaatgatacatgtgcctggatgagggtgcactgtaaccaatarctcctatcatccccagtgtgttcctaaatggtctgacctctggctgctcttacaagcctagtaagcacttgattatggctgcctgtgaattgaaatcatataaataagccaaatcagccctttatatccgaatcagacgtgaggttgccatgcttacttttaaatatgaatggctgtgtgttctgggacatcccaatatttcaaggtttttntgaaatcaaactataaatttctggctggggagcagcanaactatcc

SEQ ID NO: 55 - DNA, 282 bp, Homo sapiens
  SITE (274): n equals a,t,g, or c
agccaatattccagtagtgaattcagcaaaagactagagatgaagttgtcatctatctctctagttttagtatcaaattaaagtggtacgtttcagcgttcagttttcaagtgtggaaccattttcattccagatgcatcaaattgcaatttggaggagaggcagcacaagcagaagcctgggcctggctagcagccaatgcagctctgcatctgtgcatcactactaaggagtctagtgcttacagatggaagcatggcgactattattccanttacctgg

SEQ ID NO: 56 - DNA, 360 bp, Homo sapiens
  SITE (278): n equals a,t,g, or c
  SITE (294): n equals a,t,g, or c
aattcggcacgagcccgattctgggtacatcatctgtttcaaacaggctgacagctgggtggagaaggaggagccggcacctagcaactgacggcctcgcacggaactgccatcctgtgagggcagcggtggcgcccggcaaagttggagcccttgcggtaccagaaagcagcgagassaggacctgggagccagggcaggggtggctgaccccatgctcagcctctaggggacggcaggccatcaggctgggggctgtgctatgtgggatggatgtntgaggaaccccggttncacttaacaactaaatacaacatcttttgcaaccctagaatgtcattttgccctcaacttggtatt

SEQ ID NO: 57 - DNA, 703 bp, Homo sapiens
  SITE (508): n equals a,t,g, or c
gaattcggcagagcccacctctgccacttgctgggtgaccttgagcaatcacttagcctctgtttcctacttagaaaatggggatgactgtgtttcttgcctcatggaaatgatgtgagattaaaggacatgatgcatttagatgccaagaacggtgcctggcacacaggaagcacccattagtcattcactgctatgtttctcttgtttttgtcatcagtcttcatgagctcaccaggtgatgggagcctctgctgcacctcctgatccttttcactccaacagcttcaatcactttgttttgctgaatttttcagaaatctgcgtttttccagaaattactgcaaaataatcttccttccttctgtatcctagctggattacaagcctgttagaaaccaggactagtttcctccatgttctacaaccctccttcttatatgtgtattccatgaagctacctagaaaaaatgacacttgttcatctcctctccctctcaagtcctgnctttcctctgtccctcccctctggctcagtcctggttgkccttaaaagctcagctctgccctyagcttttycaggtgccttccctgaacctttgagctagactcaatggtgkcctytggcccttcsaaccttatgcacactcctgcgctgggcttggtacattacaacggaatggctctttggggaatcttttcc

SEQ ID NO: 58 - DNA, 332 bp, Homo sapiens
  SITE (313): n equals a,t,g, or c
  SITE (328): n equals a,t,g, or c
aattcggcagagcacattttaaaaagtaaaatgaaactggtaacatttatttaacctgttcaaaatattatcatgtaatcaatataacaataaatgggatttgatgtcattaatattaatattaataaggtatcctacattatttttttgtacgacatctttgagatctatggacactacattttacacttacatctccatgtggaccagccacatttcaagtgcgccagtagccacatgtggccagtggctwaatggagtgaacggtgcagctgtgggrctctgaagggscagaagccacgctgagttcttntgtctggggtccccngctt

SEQ ID NO: 59 - DNA, 127 bp, Homo sapiens
  SITE (98): n equals a,t,g, or c
agctcatgcattcaaatcttcagtgatttccctttacctagagtggtctttcccaaagtacagcatctggacccctgctggcacacatgataattttnacatgatacataatagttctttttatttt

SEQ ID NO: 60 - DNA, 290 bp, Homo sapiens
  SITE (243): n equals a,t,g, or c
aggcaaccagtcagtgatatcccatactttataacttgcaagcccctggscccttcccatctactaacttcaatgatcctgtgaggtaggtgcaatcattcctatttcacaggctcaccctccaagggtccaatgagaagccgccccagtccctcttccctctggcttctttcccccaggaagatgtgcgaccctggcatgacagccttcgaacctgaggccctggggaacctggttgagggnctggacttccatcgattctattttgaaaaccgtgagcaattccttct

SEQ ID NO: 61 - DNA, 428 bp, Homo sapiens
  SITE (298): n equals a,t,g, or c
  SITE (403): n equals a,t,g, or c
  SITE (420): n equals a,t,g, or c
  SITE (427): n equals a,t,g, or c
aggtgggaatagcggatgacccgaggcgggagcggggagatagtgggggatcttggggtgaaagaaagcgatctgacctcaaacagacgctcaggaattattaaatgaattaatgtgggtggatgaatggctgcagggaacagttggggagaggtaaattggcgggatgagagggagcagggattctagagaatcattgtaggaaaagagacggcaaatgaaaaggattcagagggccgggtgcgtggtggcttacgcctgtaaatcccagcactttggggaggccgaggcgggcggncacaaggtcaagagatcgtggaccagcctgacccaacatggttgaaaccccgttttttatttaaaatttccaaaaatttagcgggggttttggttggcgcacacntgttagttcccagttanttggggng

SEQ ID NO: 62 - DNA, 333 bp, Homo sapiens
  SITE (328): n equals a,t,g, or c
cacatattgatatttattttatttttcatgccctttcatttttctctcatttttcctattctttactcttcccaatgccttctgggaatgtttcaaaccactctccgtcttatgaattcattcctcaactgtattcattcaaccctgaattaaattgtttgtttctactatatctgattggtccttttttataactccttgtccctatttgtttccagtgccctcctacatgcccttgaggaatatttattaggattattgtaaattgttttctctggcttatcagttcttctccctccagaattagttgtttagtttgtgatcttgnccttt

SEQ ID NO: 63 - DNA, 415 bp, Homo sapiens
  SITE (392): n equals a,t,g, or c
  SITE (404): n equals a,t,g, or c
  SITE (409): n equals a,t,g, or c
  SITE (410): n equals a,t,g, or c
agggaagatatggatgaggtgggactatcatcatgtacaaagatatctcatttggcacttgatcaggtgaagaattattttttgtctttcttcctgttgtgtatgcaaaagaacatcttaaatgaacttaacttgaactaggagttgatcaattgattttaaaaacttggttatagtaaaaagcattaaaaattgatgacttaaacattttactttaatcaaaatatatagacatacatgcatttgttagttatttggttacagggcagtggttttccaactggtggattttaccctccaggggacattttgscaccatttgggggaccatttttggattgcccactactgscatgggggtgctmttgccctgtagtgggtaattggcaagnccagggtgctgnccaanntcctt

SEQ ID NO: 64 - DNA, 403 bp, Homo sapiens
  SITE (348): n equals a,t,g, or c
  SITE (390): n equals a,t,g, or c
  SITE (395): n equals a,t,g, or c
aattcggcagagcttaccaaaaatccagtatccttgccatccttgccaaatcccactaaaccaaacaacgttccttctgtgcccagtcctagtattcaaaggaaccctactgccagtgctgcacatgtgtgatagttgaaaatgtgaggttgctgaggtcttggtggggaagtgcgatcagggagaggagccgagagctgagaaagaagtttgggaaacacttgttgggggcagaggaggaagagccgtggaatgggaacaatgggagaatgggccctttcaccttcctcccagacatgaggctctgccctttgcaktcttcatctttccagggtttttggcagtttncttttggggggttaaggggtttaggcaaggtttcaagggggnaatantgggtttg

SEQ ID NO: 65 - DNA, 343 bp, Homo sapiens
  SITE (158): n equals a,t,g, or c
agctgggggctcaggaaggaagtggcaaagatgtggaattttcaggtcatcatcaggcctgaacaagacctgatcaccacccagtctcggtcctcaaacagctgcttgtgaaaagttaagttctgtgaaccaacttcatggcacaggctatgcctagnaattggtgttctactaggtcagtcaggaagtggacagggggatttgagaaatgtttttagagcctttgtgctctgaaatgtaccctcctccctaacccaactagcctagcctggatgcttgaaattccataaagaccaagccctgggattttgattggagagttggggaatgttttgcagccctt

SEQ ID NO: 66 - DNA, 381 bp, Homo sapiens
  SITE (275): n equals a,t,g, or c
  SITE (329): n equals a,t,g, or c
  SITE (356): n equals a,t,g, or c
aattcggcacaggktaaataatagcgttattttaactgtgtaaaaaaatgtatagaacaggaaactttccgaggtaactgaaatgttctgtcttgattggagtggtgattacatggttacatttatcaaaattcattgaattgtacatttaagatctgtggcatttcactgcatgtgaaattttatcttaatttttaaagataaaatctgttcaactattttgaattggctaaatattttggctaagagaaaacagaaatttgttggagagaaantaggagatatgccaaatgttataatgttttatctttgattagtggttctctgantgactcggaaaactctacattttcagntctgcttacatggtgtgtatgggta

SEQ ID NO: 67 - DNA, 313 bp, Homo sapiens
  SITE (4): n equals a,t,g, or c
  SITE (21): n equals a,t,g, or c
  SITE (242): n equals a,t,g, or c
cggnacagtgggccctccagngcccttcggaaagggaccaggtgaggtgggtcaagtgcaccagcaggggaaagcagttttccagttcacatgtggaggtcttcccctccccttagctgcaggaaggatgttacggctcaggatcccaggccaggattggagggagggcctgggctgagactggaggaggagaaagaccctggtctaacttcccaccccatggtgcccttttagttgggcantataggtacaggttttatgtctcaaattttctccttctgtcttttttttttttttttttgaaatgggtttt

SEQ ID NO: 68 - DNA, 498 bp, Homo sapiens
  SITE (200): n equals a,t,g, or c
  SITE (453): n equals a,t,g, or c
  SITE (498): n equals a,t,g, or c
aattcgacgagccgagatcatgccactgcactccagcctgggcgacagagcaagactctgtctccrgaaataaataaataaataaatgcagaattactacaaataaaccagttgttgatgttatggtgaaggaaagtgttggaattcagagaagttatattgatcaagtatattatggcaacatcagtgctactgcattnaacatcaatcaatttagcaaggcatatctgcatcattaatcatttagtaaattataagactaaaccatggttgcaggcttaaagatcttctgctatctcaacactatcactagtaaacagaggccmttatcagtaggactgttgactttaaaaaatttccctctgttgtttcawatttttgattttcatgtgataattattctccaaaatgaaaccaaataataaggtatttccacactttatgtaaggggantaaatcagttataactaattttctaattaggtttttatcatttcn

SEQ ID NO: 69 - DNA, 350 bp, Homo sapiens
  SITE (322): n equals a,t,g, or c
  SITE (325): n equals a,t,g, or c
  SITE (349): n equals a,t,g, or c
aggstcagtcttacgggaagcctctggaagccagagaatatacatatttgggttttcattgtcatactcccaagtaatgattgcattttaatggtctactaaggaaaacaggtctatatggatgttggctcccaatgaagtgcaggactgccagttagagaaagaggctgccacaacaaacagggaatagaaactctttcccacattgaaccaatttccgsamtggtgggtttcctcttttcctgtaaaaaatgcagtttcttaccctgtggcagatgatttctaagctggtggaggaaagttagagtaagttaattttttnttnctcctatttacccgaacccttaant

SEQ ID NO: 70 - DNA, 344 bp, Homo sapiens
  SITE (304): n equals a,t,g, or c
  SITE (339): n equals a,t,g, or c
tgaaaacacattccataccaaatcttgtatgaaaacattaatagccatattatttataatagccaaaaaataatacctcacctgagggaatggaaaacaaaatgtggcgtatccatgttatagcacatgttagaatttccttcctttttaaggtcgagtgaatacttcattgtatgggataaaccacattttgcccatccattcatcggccgacggacacttgggttgcttctacctttttcctcttgtgagtaatgctgctgtggaacatgggtgtggcaagtgacctctttcaagaccctgnttttcagtttatttttggggtataggaccccgggngtggg

SEQ ID NO: 71 - DNA, 330 bp, Homo sapiens
agctctgaagagccatagggcccccacctttactcacaccctgagaattctgggagccagtctgccatgccaggagtcactggacatgttcatcctagaatcctgtcacactacagtcatttcttttcctctccctgagcaacacctgactgagctgagggaaccagctcctggcascaaccagcgccagccagcaagaaagcctcaaagggcaaggggctccgagggagggccaagatttggtccaagtcgaattgaaagaactgtcgttttctccctggggatgtggggttccagttgcctgcctgcctttaggggttcttcagaggg

SEQ ID NO: 72 - DNA, 363 bp, Homo sapiens
  SITE (280): n equals a,t,g, or c
aattcggcacgagggacctttcagttgattctaatacgcactaagttgtagtttccagatgatactgatgctactgctatggggaccacactttgagaaccactgctagaggaaaggagagcaggagagaggcccacctggtaagtagttgccctacctcaaccttggatgcccaagaatgagggagaaggggrtactactgtgttctgcaaagcttttttgaaggatggcgcactggtttccacctggstgtgcatctcccatttacatcagagagggncattataaataatgaccacaaagcagctaacggttactgaatgctcactttgtggccaggccgtgtttcttaaaagtgttgcc

SEQ ID NO: 73 - DNA, 199 bp, Homo sapiens
  SITE (112): n equals a,t,g, or c
ctctgatggacaggaggtgcctggctgtgacaagtacccactggggataaggggtgagggctcccccaggctggaagggaaacttgaggggtcactctggtgagcccctgtntccatgcaggctggactgctggaatggaaagtggtctagggagaccgtcaccatccttggggagaccctcaccccctgcccgtttgt

SEQ ID NO: 74 - DNA, 212 bp, Homo sapiens
  SITE (90): n equals a,t,g, or c
agggagggtgacagaggcaggcccaggctgaagattcaggccatctggcaggctgggagcaggcctttggttgggccaggggctgttccnacccactcctctgcctctgcccccccgcagaatgtctctccgcagcaactcctctttggaagccccaccttcagggacctaacatcttggcgttcttctcactgccaccagcccctgcatgt

SEQ ID NO: 75 - DNA, 462 bp, Homo sapiens
  SITE (373): n equals a,t,g, or c
  SITE (419): n equals a,t,g, or c
  SITE (449): n equals a,t,g, or c
  SITE (450): n equals a,t,g, or c
ttcggcasaggkacagcatgagaaactagatcacggatggggtgggagagggggctgcatggccaggaaactgctggctggaggggtgtggaagtttgcatcctgcctaaggagacagtaagggcagttatcttcctggacaaataaggacataaaaccataacagtagcttctttttaacaatgtgtaaggcaatatgctgagcatgttatatgaaatatctgacttcatgctcaacatcccagcaaatggatgtctgtaatattagaacagtggccagcacaaagtatgcacaatgtaattkttagtgrttatcctttatcatcctcagcctcaccattcccatttatcatttgaggaaattgaggctcanacttgttcaagatttcccagcacctaaataacaaaggaggaactgnaagttgggtctgtcagtttcagagaaactnnaatccaagtctg

SEQ ID NO: 76 - DNA, 367 bp, Homo sapiens
  SITE (100): n equals a,t,g, or c
  SITE (299): n equals a,t,g, or c
  SITE (319): n equals a,t,g, or c
aattcggcagagccaggtgtaagttgttcaagccagagattactagtttggcttcagaagacatttgtcaaggtagaagagtacaatttagaatctgtgnattcatgataataaaagctctggggaaaatggggacaaataaaaaatagaatcctaacagatactactgggtagagcaagaacatatggacagaaagataatgttggcagtctttggatatgtaatctatttaaaaatacaacttctaagtaagtgtcttatagaaaagatagaggctgggtgtgatggctccatgccngcaatcccaaagcgctgggnttattaggcatcagccaccgtgccattgaccccaggaaacaactttgg

SEQ ID NO: 77 - DNA, 361 bp, Homo sapiens
  SITE (14): n equals a,t,g, or c
  SITE (312): n equals a,t,g, or c
  SITE (341): n equals a,t,g, or c
  SITE (358): n equals a,t,g, or c
agggaaggtttgtntttttaagtgggtcagaaattggaactttaaaatgttggtttcagcaattttggtttatctgttctttactttcatctacaaataatttgaaacttttatctctctgttgtttgttcatcatcccatcaatccgtcggtccattgtgtagcatccactgcaacacacctttctcttagatttaattttttgttcactggagatttgagggctcatcaccaaatccagaggtccaggtttcccagtacactcacggtttctggggaggaaactgtttttaggrttgccattaatgtttnccagggcccttcccatttttgtgttgggnttaaaatggtgacaccngga

SEQ ID NO: 78 - DNA, 318 bp, Homo sapiens
aattcggcagagttacagtgacaggggctgaattaaattcccaggttgggaccaccactttttagtctgacccctgcagccggagtctcccagagcccttgggaactcggcagaggagagaaggctgagggacacctgggcagggaggagaagggagaagagctttgtccgttagatctggctggtgtctcaagcgcacagccaagtcgctgtggacctagcaagggctgggatggactcgtggagccttcagggctgggtagggaagctggcgaggccgagccccgtcttgggcttttgggcgccttgacctcggtt

SEQ ID NO: 79 - DNA, 268 bp, Homo sapiens
aaaaaatacagcattgctaaaccttgtcttctcattcagtactagtgtaattgtgttttagaatgccagttgtgtctgcacattcccagccctctcaagttcatatccatcaaagctgtcagtatgtcatctgtagcttcatctatgtcatttacaaaagtgttgaattggtaattattttaagtttaagttaaaataatcttaaagtttaagatttctttagtcctgggatattatagaaaaaaggttttggaaataaacatccaga

SEQ ID NO: 80 - DNA, 313 bp, Homo sapiens
  SITE (302): n equals a,t,g, or c
  SITE (307): n equals a,t,g, or c
agctgcttttaaaattagaatccgcggtgggggaggaatcctccagaactaacttgggcatgtgttctgccaggcagcatcgcccactgccctggsaaagtttgggcagctctatatggtggtagaaaatctcggtggactgtgtcaccaatgatggttcagagcctcaaacaggagactgtttkctctaagaggagactcacagagaggacctcagtacttctttctcttgcttgtggaccctacatttgaggrgcaggcaaagaattttggctggcagaatgtgatggrtcacattattngtggnacattt

SEQ ID NO: 81 - DNA, 357 bp, Homo sapiens
  SITE (203): n equals a,t,g, or c
  SITE (328): n equals a,t,g, or c
agggctaagtgggctctccctagatcttttcagagctgcagtctgcctgaccgtgtatcttcctttcctcttccatagctcctatttccaactcccctgccttagtgtatccattgacactaaggtgttgtgactgataccaagataatatgctgcctcttctgcctctctctttgagagagagagagagagagaccaatggntcaggttcatttagcacctgaaagggggtggtgtttggggacagagagacctttggagttccagcttaagggtatcagcctccctggcttgatgtaagtcaagaggcctcttatacccacttttnatgaggaaggactttagagtttgatgcca

SEQ ID NO: 82 - DNA, 157 bp, Homo sapiens
  SITE (78): n equals a,t,g, or c
gacataacatccaaatgtaatatagaatcgaatactgggcttttaaaaagttggcgtgtttgtttcctgcaggggagnaaaaagaaaacttaaaaagttggtgtgaagaacattttagggactactaaggaacttttgagtatggactaattgttgg

SEQ ID NO: 83 - DNA, 263 bp, Homo sapiens
  SITE (88): n equals a,t,g, or c
ttggcctcccaaagtgttgggattacaggtgtaagccactgtgcccagccccaatttctaaattcctaagatttatgttagtatttgnaacattgccaattgcatataggtatttcttccttctcccatttctttattactagtgtattaagtatgtctttattctaatgctttgacatctagggtctggttaacattggagggacaacccctcccagggctaattcctagagatagtaaacaacttacatatgcatgtctgt

SEQ ID NO: 84 - DNA, 358 bp, Homo sapiens
  SITE (223): n equals a,t,g, or c
  SITE (298): n equals a,t,g, or c
gaaatgtgcctcgggctaatgtccaagttgctgagcatatactttgagaccagwgcgggtgggtacaagtgtcttctacatagcaaaagatggaccagaagcttggaaaggtaatgctatgatagcatcagacaaaccttaaagaggtgtgggtgcaccgtgggcaagtgagcagcagcactgtgtttgggatacttggtggggggtgcaatttaggtatttncctgaaaccttatctgttgcctagtcacagcacacccagctcatttcaggcagggctggcatgctcaaggatttncgcgcaagctccatttgttagcgttgaggttgtccctgggagctgccagttttaatttgc

SEQ ID NO: 85 - DNA, 402 bp, Homo sapiens
  SITE (332): n equals a,t,g, or c
  SITE (378): n equals a,t,g, or c
  SITE (381): n equals a,t,g, or c
ggcacgagtagcaaaggacactgagaaataaataatgagatataaagagaaacaagattagtaagtatgcatcatgtgccagacaccatgctccagacaaaggatgcaaagacaaacacaaccccgtcctcatcatcctcatgctctaatgcagcagtcaggtactacaccttgaaataccattgtgattggttcagggatgggtgtaaaatgtcagggacagtgagaccacaaccttgttacttctgtgaatgattacacacacacacacaatcagccatacttgcctcttctgagtgattctttttgtttatttattcttttgtcttctnacaggcattggttaccaaaccttgaggatctaccttgtaatatctnttntgtgtggacacctcctgtgcc

SEQ ID NO: 86 - DNA, 458 bp, Homo sapiens
aaaggttttggtctttgttctaaatagttatgatttgtttttcttttctgttttgtctccagtaaaaaaaagcttatctttttattttctccctagcttcaaaatagatttttgtctggacataaaatctgttctttaatcttatatctctaaacaaaaccatatggcttactgtcacttctttggcaaggcttgagtttctttcaggatatgttgtaaagttcccataggctgtaagttgacctcacctatagagttagaattgtaaargagctacattcctattccaaawtttctgcaaagtgccagattgcagcttattactcttctagagccccccatawttacgtyctttttccttcccaggaatcctcctcactcactctctattgcagccaagacatgtttgggctaggaccaggggaaggccataggaaataatgtaaccccttattcag

SEQ ID NO: 87 - DNA, 127 bp, Homo sapiens
  SITE (43): n equals a,t,g, or c
ggcacgagccccaccccctcccaccagtccaggctccctgggnagttgctggggggcggactgaagggtcctactattcctggagaccactggcactcctttctctctggggtctctctgcaatggg

SEQ ID NO: 88 - DNA, 269 bp, Homo sapiens
  SITE (66): n equals a,t,g, or c
  SITE (253): n equals a,t,g, or c
ggcacgagtggggattgggaaagttcaattttattgtaccgccaatgaaaaggtgctatatttttntcttgaacctcaagggcagaggctgaattaatcatattcctcagctcattccacattatcatggcaaagctctcttttgctttatttatttattctcttttatcttcatacttaatctcattccattctctgccatgggcaaccattctaatgtgttatgtataattcttgtatatgtgtattattntaaaatgagggattct

SEQ ID NO: 89 - DNA, 354 bp, Homo sapiens
  SITE (347): n equals a,t,g, or c
  SITE (353): n equals a,t,g, or c
ggcacgaggtcagtcctcaactctgcaggatggtcttgcccatcagatgaggcaggtccaacctgagcgccccttggtctgctgacccctcccaggccccattcctgcttgcagggcagcctcaggtgccctggggggcctgcattatagcttctgtactggtagaccatgggtgatcagtggagagtttcagcagggtggtttctgtgggcatgaaccagctgcatactycctccctatgttgcagtttcccctaacccatggcaacttactcagctggcatgtatctgtgtgggtgagttttgctttctttgccacaacagtgtgagggagtgcagtccgacccncttcanc

SEQ ID NO: 90 - DNA, 355 bp, Homo sapiens
  SITE (296): n equals a,t,g, or c
  SITE (315): n equals a,t,g, or c
  SITE (323): n equals a,t,g, or c
ggcacgagtgataacatccttaaaatatgaaatatattttgaacctagatacctacccagtattctctgcacagagtaaacatttcattaaatgagtttcaaggactccataccctgatataggagtacattcaagaaatgagtttaggccgggcgcggtggctcacacctgtaatcccagcactttgggaggccgagacgagtggatcacctgaggtcaggagttccagaccagcctgaccaacatggtgaaaccccatctctactaaaaaaaatacagaaattacccgggcatngtggctggtgcctgtaatncccggtantttgggaagccaagtggggagaatcccttgaa

SEQ ID NO: 91 - DNA, 232 bp, Homo sapiens
  SITE (212): n equals a,t,g, or c
  SITE (223): n equals a,t,g, or c
caggagagcatcagtgctgccttctctggggctaccaggcccgctgcgtcaccccgggatcccaggcagcttcacaagctgccsacatccttccccagcccaccactctagccagtagaccagcgctgaggcaggagaagaggggccaggcagaagcagagaaaggctgacagcccgctctgcatccctctctggtctcagaaaccaggaantgagtcacacnaccagctct

SEQ ID NO: 92 - DNA, 615 bp, Homo sapiens
  SITE (65): n equals a,t,g, or c
  SITE (567): n equals a,t,g, or c
  SITE (598): n equals a,t,g, or c
  SITE (607): n equals a,t,g, or c
agggagaatgtagaaaattycaaamcccaacatatarggtatcacacaacccaagaaaagtaaanccattgcaagtttacttgcgttgagtacaaaacagatttaatggtgtyctatgtcatagtttaatgctctgggtatttaaatatgttttcaacaggatttgagttgaaagtttgtaatgtgctttgatggaacacctctcaatttctattcaataaacttatgtaattgtccattgacaatataatgataacagtaccattgaactctaaactgtggtttatcttcactactgggaagcaactgtgcatcagtattaaagatatgcagaaacataatattcactaatttgttcatctgcttctgtatattgtttatggaattacatggcaagaactgttctaaagcaacatgtctttccacattattttagaggtgaaattacttttgtyttgcttctctataatgtgtacttccaaatggaaacaccatacttttttcctaaaaaaagatgttcaatttactaattttttaaaccccataatttaaaaagccatttgttgnggattttaaaagggttgccaagaaaaggggnttttggggnccgggggg

SEQ ID NO: 93 - DNA, 154 bp, Homo sapiens
ggcacgagtggtggggtagtgtgcagatgtggaaatgggcctggcaacggccagatcccttcctttgtcccaggtattgtttggaakcatcatttgtagtgaatgactaatagtgttctgaagcattttctattgttctaagttctttccagga

SEQ ID NO: 94 - DNA, 348 bp, Homo sapiens
  SITE (115): n equals a,t,g, or c
  SITE (116): n equals a,t,g, or c
ggcacgagaggatatccttccgcgcggggacgggaccggggcgcggggggcaccggaagtggggcggggactcaccctttagctgctcgggtccttgacgcttcgcacaggtganntcccgggatgggaaaggmgacctgggggacctccccgmacacggcccacggtgggcaccaatcttactgacatcgtggcacagagaaagatcaccatccgggagcttggggggtgcatgggccccatctggtccagttactatggaaactgccgttctctcctgtttgtgatggacgcctctggaccccacccagctctctggcatcctgtgtggcagttctttaggtcttc

SEQ ID NO: 95 - DNA, 317 bp, Homo sapiens
  SITE (210): n equals a,t,g, or c
  SITE (308): n equals a,t,g, or c
aacttttccctaataattattgccaggatcccttgtatctgtaggatttgcaaaatgctggttttcacattttgtcattttttatgtgaatgtattagctaaaattattatcttatgaaagtcttcccttcgtccactatttggttagcctaaatactgttcataaagaaaggggagggtaaatgcatcgttctcattatttaaaacttnttggaatagtgaattggtgccttcaccctccaaaagtgactaagacctcagggtggttcctgagacatttgacgtgaacataatagaccttgatagcnaattactcc

SEQ ID NO: 96 - DNA, 448 bp, Homo sapiens
  SITE (413): n equals a,t,g, or c
  SITE (447): n equals a,t,g, or c
ggcacgagtaattagtgcctgtgaagaggaatcttttatatttaaaatgtttagacaggattaaggaatgtgaaggaccttaccttattcaagcagaggctagaaatactgcataactttagaatttgcatgatattcagttaaatagacatgttaaaaatgtaaatgtatctacttaatagaaatgaagctgatacttccaaaccaggagaggaggggaaaagttctgaaagaaaatattcatacggtggaagaaagaaaaataaaatgtaaaaatgataaaatagaagttataaataagatggtaaaaataaattcaaattgtcataaatcacaacaaatgtaatagatttaattgattacacttattctattaaaagatccagaatttcaagttcagctatattgtggtnatgagacatatctaaaacaaaacacagaaagttng

SEQ ID NO: 97 - DNA, 352 bp, Homo sapiens
  SITE (294): n equals a,t,g, or c
  SITE (322): n equals a,t,g, or c
acgcctcagccacctcccgcaagcctctcactgcctcagccacgctttccaggctggtttctggtccccatccgcggctggtccggccctgggaccgaatcacttcccagcgagaggaaggtcaaatttctcgaccggctacgggaaggtcgcggccgccgccctgtcagccgcctcggcgcccccaggacccctcgggtctctttaaccggaagcggaagtgcgtgtcggcgggatcatgggcgactttggtcgaactgccggactcggtcctggcttcgagatcttctcttnacctcccggtaacgggaccggattccgnatcttccaagggtttgtgaaacgctgggaa

SEQ ID NO: 98 - DNA, 271 bp, Homo sapiens
  SITE (112): n equals a,t,g, or c
  SITE (113): n equals a,t,g, or c
atcatatttagttcgactaaagagatgtcaggcttctttcagatctggtattctatgatcctgaaaattcagagattctatgaatcacttaatgtgtgttcttctctatggnnaattgagtattattcaaaattatakgtgttcactaattcaacagatatttcttgaatacctaatatgtgtcagaagctgttctgggtgcttggggatgtttgtgaagaaaatagaccaaacattttaagcccttgtgtgctaataccctacagggaga

SEQ ID NO: 99 - DNA, 522 bp, Homo sapiens
  SITE (480): n equals a,t,g, or c
  SITE (484): n equals a,t,g, or c
  SITE (511): n equals a,t,g, or c
aagtaggggtttaaaattttgatatagctaaatttattgatttttctctttatggtttctgtcatacttgagaaggcctttccctaagattacaaaaaatattctctattcttaatactttatggttgtgtttttaatcgtagctctttactacatctagaatgaatgagaaggatgaatagaatgaataggaatcaagtgtgtttaaagagtattgctatttttgatggctgcataatgttttatcacatggatagcaccttcatgtgttgcccattcccttaatgtcagacatttagactgctttaaattttttactcttataaakaaaattatactgtatttcccagttawttccctaggatagagtcatagaccagaattacaagatcaggaggagacyaagaaagtgaggcagttataagcagggacttaaagccgcccggcctgcaattggattcccaactccaccatttgggncacnttggtaacccagtcaccgggactaccntttgccttggg

SEQ ID NO: 100 - DNA, 316 bp, Homo sapiens
  SITE (270): n equals a,t,g, or c
  SITE (277): n equals a,t,g, or c
  SITE (310): n equals a,t,g, or c
ggcacagcagaagcaaaggaaatttggaagcaaatcaaaaacctctcaaagagtggaaaaagctttgtacttttattttgcctttgtgcattgttgtcatttatccaacatgtgcatatgaatattctttctgaagacctgggcttcattttaaggtcagccttcaatttctagagaatataatttgctgctatttttagagcatcatgattgcttgtaataactaatggaaaaaaactcagagaaatgaaatgtgtaacagcctgtgtncggcttnaaacttggattgaaaggccagtaaaaaaaagtnaaacag

SEQ ID NO: 101 - DNA, 445 bp, Homo sapiens
  SITE (374): n equals a,t,g, or c
ggcacagacaggagcgaatctggagctcatgaggctgactcttctaaaatgcagccacaggtagtcatcgaatccggcttcctatgctgtgcaatcaacaaatcaaaataacttgtgtcatcattagaatgtcagatgtgcttctacgaactaagctgactcttttaattctttggcaaagggttggcaaactaggactgtttgccaaattcagsctgcctcctatttttagagtcttcctgaaacacagctacacccgtattatccatggctgctttcctgtcacagtgagtaagtagctgggactgagaaggcatggcctccaaagtctaaaatatttactctctagcactttgtaggaaaaaccttagctnaggcacatgggtaacgsctgtaatcccagcatttggggaggccaaggcaggcagatcaccggaggtcagga

SEQ ID NO: 102 - DNA, 426 bp, Homo sapiens
  SITE (410): n equals a,t,g, or c
  SITE (412): n equals a,t,g, or c
  SITE (414): n equals a,t,g, or c
  SITE (425): n equals a,t,g, or c
ggcacgagaacaatatagccgaagtagaatgaatgagtggcaccatctaccgatgggaaaactaaggctgaaaataactaaggaacttgcccaagatcagaagatggcaaagctgagatccaaacccagatctatcagacttcaaarcccagtaactatccacaaaaccaagctatctccacactattctggggctggggaacarggaagctgagtggcagactgcgcgggttccggctgcccagagggraggcccttgggttcattcattctccaggcgctgccctggggtcagctctgcaccgcctgtgcttcagcctggggaggggacacagggacacaaggtgtgttcttcaggaggatcctgggcctggggggttcccaagcatggccagcatgcgttattgcantntnggaaaaatggnt

SEQ ID NO: 103 - DNA, 113 bp, Homo sapiens
  SITE (103): n equals a,t,g, or c
gtggatcccccggctgcaggattcggcacgagagtacatttaactgctgcagatttgagttcccaggggaaccaaacagaagttcacacaatttctaggatgnaaacatctca

SEQ ID NO: 104 - DNA, 340 bp, Homo sapiens
  SITE (277): n equals a,t,g, or c
ggcacgaggtttttaggacccagggctggaaagaggtggtgtgggtgtcccctgtaccccgggaccctgtgacgctcacccacagcaacctcgtgtgcatgttacacaggagcagtggccacacggaggccccgccgaggccaagcggtggaggaacagtgacccgtgaggctccctgagatctattggaggagagtgactggctacagtcactttagagtggggtttgtccctcaggcaggcctagcagcggtctgcgtgcatgtggtctagtcgngtgtgcatgcaggaaacggtggcgcatggtgtgctccacctccgattcagaggccagacctca

SEQ ID NO: 105 - DNA, 250 bp, Homo sapiens
  SITE (227): n equals a,t,g, or c
aattcggcacgaggtcaagtgtgccaccatcacccctgatgaggcccgtgtggaaggtgcgagggtgtggaggtgggcgggccagkkwwgggtcacaggcttctcccaccggcctctccagacttggggtggggcagttggccatgtcactcatctcgggactgggaaggttgggaaggctccaaagctggggctttcctgaggccaactgcacctgaaggccagtntccctgtgtgtgcctggtggaca

SEQ ID NO: 106 - DNA, 620 bp, Homo sapiens
  SITE (582): n equals a,t,g, or c
  SITE (584): n equals a,t,g, or c
  SITE (587): n equals a,t,g, or c
  SITE (611): n equals a,t,g, or c
  SITE (618): n equals a,t,g, or c
attagaaagactagaatgtaataacatgaacaacattgtcaacaatttctgcaaaacatattaaatgaaaaaattcttagaaagacataaattaacaaaactgattcaagaaaaaaatagacatatgaatagacctaacacaaacacagaaactgaattagtaatttaaaattttccaacaaaaaaacccaggtccaggagaaagataggaatccgaggcatccacagtatagaagaagaaatgaaactctctttattcacagacaatacaatcctgtatgtagaaaaatctgatatccacaaaataactgctagatctgataagttcatgaagcttgcaagataatcaatatacaagaataaattacattcctgtgtactagcaataaaaaattgaaaatgatactaagaaaataatttcattctttgtagcataaaatagattaaatggtcataaatttgaaaatataagtactaaacctgtactctgaaaactggaatcattgctgacagaaaattaaaaatctaaataaatgggaccattattccatggtcatgaattggaagactcatactgataangnaangattctccccaacttggtctatanatttaangc

SEQ ID NO: 107 - DNA, 338 bp, Homo sapiens
aaattcggcacgaggtaaaggtgtatcttagggtgggggaagcatgaggaagagcattctaggcagagggaacagtgtgaacagcatgcttccaggttccggggagcgtggctcctccaragcagggggaaggcctgggaaggctgaggccagggaaggagggggcccgtcgaggcatgaaggttcagcaaggcctgatggtcaatggaggaaccgtgcctttaattctgagctcacccgggtgtggggttctgctctgtttccttccatgccctgatttctctgtggccaagtacatttgccgtcattccatgtgaccaaggagaggccaagaatgt

SEQ ID NO: 108 - DNA, 374 bp, Homo sapiens
  SITE (339): n equals a,t,g, or c
  SITE (362): n equals a,t,g, or c
aaattagaggctcagatgaaatatattctgagattccaaaagcacccagcattactttttacttttagggaatgcctgaaggagggacgctagagaataattcttggttatgttgacccttactggtcatggagaaacactagtgaaaaacagaaaaaaacacaaactttccagcagctcaaggttcttccagtttcccatttttcaattaattactcatgagcaattaagtagtagaaatcctattctcgagagactycatttcaataactgaggaaaactttttggaatttacttattaaatcacttctgattttgttgttttatgcttattaatantcacggttaaaccagcatgtccnttagattaccga

SEQ ID NO: 109 - DNA, 369 bp, Homo sapiens
  SITE (313): n equals a,t,g, or c
  SITE (369): n equals a,t,g, or c
aattcggcacaggattcaagcagctgcagtttccggatatgtgtccacatctgttttctgtcttctgaaaaagaaaaatttccccccaaaccacaccctgcccctgcattgtctgtttgacacaaagtttcaggaccctgaaaaaaagccccaaagtgcttcttcatcatcttggggaatacagggtacgtggtggtggtctctgtattttccgaagctgggggtagggagtggggcagacttaggcaaggtgcagcctcmagggaggctkaaaaacctctggaccttggctggcagtcttctttaggatgtncagaaggaggaaccaggttttccaggcagagcactggggggctttcggacacaaan

SEQ ID NO: 110 - DNA, 211 bp, Homo sapiens
aattcggcagaggaaaattttaggtctgaatttcatttgcaattcatggtgtgatttaatctacattaattgccctcaggaaacttctatatcagaacgtagatgagttacacaggcaagtgsgaaccttgacaagrtgaaagaaaatctgactgggaaatggacctgttctgcagcaacaatccagtaattacagccaacaagaggccct

SEQ ID NO: 111 - DNA, 339 bp, Homo sapiens
aggttaagagtcaagggaagaactcatcagaagagtaaaagaagagaactgaaaagcaaagggggacaatcaacaaaatgtgaacatacagtttatacgaggaatgcaatcatacaggtaccaataactcagttgcaaggaataattgaaatatgcacatatataaaaagtacacatactttgtataacttgaaaaacatttgaggatcaaataaaataatgtattcgaaaatatttataaaaagcatgargttttctacagacaaattagtgggtgcaatactgagcgctactccttgaaggtgaacaccatagaatattgttcagtgcactcaacaa

SEQ ID NO: 112 - DNA, 368 bp, Homo sapiens
  SITE (197): n equals a,t,g, or c
aattcggcacgagccatgatccaggagaaaatraagtragccagacatttgggaccatttttycctaagggcccttgttgattttggaagaaatggctgagaagctgatcagtactatcgatatcttatggggaagagggaaaattggaatttaagttttaccaaagtggatttttttttwawataaagctctcatnaatttgagttgagaccataaaaggccacagcctggggagtgggtaaatcagaagtagactggctccctcgggaattacaatacagcttgaaatcatttcagtttcttgagttggattaaggtaattcttgatgctactgtctatccatctcatagaagtaaaagtatatcc

SEQ ID NO: 113 - DNA, 402 bp, Homo sapiens
  SITE (112): n equals a,t,g, or c
  SITE (366): n equals a,t,g, or c
  SITE (379): n equals a,t,g, or c
  SITE (400): n equals a,t,g, or c
aattcggcacgaggaaaacaaaaccgtctctggtctttggtgtacatttttaaaagtgttggctgttgaattgagatgtgaatcacagcaatatttctggcagctctgctgnagtgtgtatatgctgctgagaatactggtggtcacttctggactgtgccttcctgagatcactagcctttgctcaggaaagagagagcatattcctagggcaggacctgagaaaggcaaaggaaggtacaggggaatgaagaaaggtttgttagaagtaagccttttagaatgctaccaagaaccatgtacttcatagaatgcttwaaaaatatttgttgtcggccgggcgtagtggctcacgaggccgaggtnggcaggtcacccnaggtcgagagtttgggaccanct

SEQ ID NO: 114 - DNA, 633 bp, Homo sapiens
  SITE (369): n equals a,t,g, or c
  SITE (596): n equals a,t,g, or c
  SITE (632): n equals a,t,g, or c
aattcggcacgaggtgtcaggctttgcaccctccctgttttttgggaattggcccgaagctttagtaagagtaagttgggagctgaagcacatatgtttgcttaactttatttaacatttttattttttaaactgtagattcagatctgactatacaattgcacatatctaagtattttttttcttctggagttacaaacccttcatctgggtttgtgtaggaatgaaatagaaattgcaaaaaggcaaattattatgttttcattagaaatttaactttagtcctgtttctgtcataggacaattttcgcaaaccccaaaacgrttctataaaaagctatttctggkctttctgctttagcaattggngraatttccacaaaattttaatcagtggaaaaccatgtaacaagcatgtgtttttaacatgaagctatgactaattatttgagaatactactttaggttaaacttcatacaaaagggcaagaagaaaaaaatatgagaaaacagaccctttttctgcttaaattcacaaatggcagattcacagttggctggaacagaacagcagggcccttcagaaacttcacagntttaaaaaatgagttctactattttgccaagctggng

SEQ ID NO: 115 - DNA, 293 bp, Homo sapiens
aattcggcacgaggtttttcatactgctagcaagttttacatttttttcatcaaatggcatgttgtgactgttcatctcaaagattagttgtacatgcatggtttattatttgttaaacacacaaaaacaaccatagtttttaccatgagaaaggttttggtagagcaaaacctaatgcacttttatatttgcatttcatctaaatgactagatttgtgaaatgtggataatgtcttgtacaactgctcttttctcttcctctgtcttctctctctttcatactttgtaattt

SEQ ID NO: 116 - DNA, 243 bp, Homo sapiens
  SITE (196): n equals a,t,g, or c
tttaattggctttttatctgccttatcttacagtgtgggmatatggatgactctgttcttcagtgccttttgtctctgctaagctgtctcaacaacctcttcctcttacttaaggttattttctaatatctagcttcttttctttgagttactttgctgttttatttttttaaaactagactattctttgcctttnatctgagtatctttgtttgaaataacatatacaatataagccttttt

SEQ ID NO: 117 - DNA, 277 bp, Homo sapiens
  SITE (234): n equals a,t,g, or c
agggggcgaggactcgggaggaagataaacgggggatccctgtctggactttctcctccaccctcttcccttcgcagctgtgaaatcctgggaggggaagggtggccgccccgccagcagagagctgaaggtgttccgtggtcagtgagggctggcactggctctgcamgaagatctyctyamctycccagcggctyctggccagctccccacggagagcccaggacacttgtncctggacacagtggtgcagccatgcttgggccaaaccatgagg

SEQ ID NO: 118 - DNA, 288 bp, Homo sapiens
  SITE (288): n equals a,t,g, or c
aattcggcacgagaaaataataaagctctagttgcagtaaatggaaacaatatttaggcttattggattgttcaagggacatccgatttgccactctgccctttgtcggcaaataacttagacagactttaggatttaatgggctgtcatttcagttattctgcagcatatcccgggtacatgggagagcattcagtgattaagtgctgaatactgtctattgtgaagacttttggawcagggawcagagaaaaataactttccttccaacaacatgaaacatatggn

SEQ ID NO: 119 - DNA, 335 bp, Homo sapiens
  SITE (306): n equals a,t,g, or c
aattcggcacgaggtcacttgcttcctgtgtgatcttaagttgtttcacttctgagcttccattttcctccataaaatgagggtaataatttctacctatagtgttgttgtgagatttagacacaaaatgtttttaagctgtgaagtacgaaatatataaaaacattggttattatagatgaggccagcccaaaaagggtgattgacttgtccattgttccactgtaacaacaagtagagtggaaaatgtggtacaaatgcatgtcctaattctagtcaggagctgtggccacaagggccaccaantccaaagtagcagtttcctgccacggcct

SEQ ID NO: 120 - DNA, 337 bp, Homo sapiens
aattcggcacgaggacagattcacttagtgacagttgccactgccgcatcttagtcaagaaccttgtttctctctgggctatgacaatggtcttgctcactttctggctttcccaccccactccagtttggaaaatgctgtcactcttagaccattaggccaattaatccttcatcccctcacttaataacttttagttgcccttgtgggaggaagctcatattcttcagttttgcttttcaagttttccccaggttgaccccaaacttcctttccaacctcgacttttgctccgcctgactttaaaactgaacattagctgggatggttaatccac

SEQ ID NO: 121 - DNA, 432 bp, Homo sapiens
  SITE (290): n equals a,t,g, or c
  SITE (406): n equals a,t,g, or c
  SITE (422): n equals a,t,g, or c
  SITE (430): n equals a,t,g, or c
aattcggcacgagcttgtttggaccataaattttgtgttcatactaccctttccctacattgaattcaaactttgaattccaccaacagtaagcatccttatgagtgcaaacatccttgtacttatgtcctcatctatccaatccctcctccttatacacttattgggaggaagacattaatactttactcactcgggctgggcgtggtgggtcatgcctgtaatcccagcgctttgggaggccgaggtgggtggatcacttgatgtcaggagtttgagaccagcctggncaacatggtgaaccctgtctctactaaaaatacaaaaattagctggccctgatggcatgtgcctgtaatcccagctacttgggaggtggaggcagggggattggtttgaacccggnaggcagaggttgcagntttgccantg

SEQ ID NO: 122 - DNA, 217 bp, Homo sapiens
  SITE (173): n equals a,t,g, or c
  SITE (175): n equals a,t,g, or c
  SITE (210): n equals a,t,g, or c
ttcggcacgagccgcgacgtccctccctcctgggcccctcctcaccgccgccccctgtagtttcagcctcagtgtcaggtgtgcgctgaatggaaaagggagattttgagacatcatgtcaacagaaatggagatgtgcactggggaaactgccggccgggccgctggsstgngnacgcctgggaggtggccaagagttggaagagactnaggtccc

SEQ ID NO: 123 - DNA, 333 bp, Homo sapiens
  SITE (317): n equals a,t,g, or c
  SITE (318): n equals a,t,g, or c
  SITE (328): n equals a,t,g, or c
aattcggcacgagggaaagaccagttaggaggtggagggcccctcaccaagagggcaggtgctgaggatgtcagaatcgctgaggactggccatggtgccacgctggatgtggggtccctgctaggggttgggatggtggggaaagactcgtgtccagcagggcggggggcaggtggtttccattcagactgcatcacctatccattcagcccctcagcactccgtgagcttttataaaacacccagggagatgccaggagcttactgttgccagagaggtgggggtgcctgcatcttcagaggggggttaaggacnngtttaagggnacaga

SEQ ID NO: 124 - DNA, 499 bp, Homo sapiens
  SITE (479): n equals a,t,g, or c
  SITE (484): n equals a,t,g, or c
  SITE (495): n equals a,t,g, or c
aattcggcacgagctacaggcatgtgcaccacacccggctaattttttttgaatttttagtggagacaaggtctcattatgttgcccaggctggtcttgaactccttagcttaagcaatcctcctgcctcagcctcccaaagtgctgggattatgggcgtgacaccacgcctggcaatttttttccttttgaaggctgaataacattccatggtatgtatatgctgcattttgcctattcatctatactgctgtgagggtgtataggtatctcttcgaggccttgctttgaactcttttgtatatgtacccagaagtagrattgtagattaggtgataattctaattttaawtttctggggaccaccatacttgttttccacagkggstgtaccatttacattcccatcaacatgsacagggttccatttctggacatcattaccaacattaactttctgttttcccgatagtagccgnccaangttggggttanaatt

SEQ ID NO: 125 - DNA, 339 bp, Homo sapiens
  SITE (313): n equals a,t,g, or c
  SITE (329): n equals a,t,g, or c
aattcggcacgagcaaaatatgattactactaagaatagtctgttgccagtagtacacagaatgagcactcaaattataacagaagcattttggtattcataaatgttctttttttaaaaaagaacacaatcgaaattataggctgtragtactgattttaattgtagtgaatgtgcaaagtgttgttaatgaaaatataaagawtatttgttaaagtgtggacctagccaggaatactaggtagaaaaggtaactctttaaaaacatttttttaattgtggagttaattattgtcactttgtttggatattnatttattagagtcccnaggttaattc

SEQ ID NO: 126 - DNA, 433 bp, Homo sapiens
aaagtgtggtgggttggggaccagctaaggaaaaaaagacatgaaggagaatgcaagcatcttacagtcatcattcagtaagaaaactttatgactggacaaaggaaaacataaacgccctttaacctagaatgcaaatttctagtgatttttacttttttagtgtatcagaagtcactgagcaaggtaagtaccagcacttacagagacggagtcataaaggctgctctctaaaagtagaggatgtgcaaaacctgtagtaccatttaacagatttttgaccttgttaattatgtcattttgaaactggaataaaatatgtaattcgaaggttgatttttcctgaacaaaagtaagtccaagtcaaagttttctcagagtctactgtttgattcttgagggtattcagaattcaaggttgatgtgcatttca

SEQ ID NO: 127 - DNA, 358 bp, Homo sapiens
  SITE (326): n equals a,t,g, or c
  SITE (340): n equals a,t,g, or c
  SITE (342): n equals a,t,g, or c
  SITE (347): n equals a,t,g, or c
aattcggcagaggatttctgcctttgacctgcatggattattttttcaggctgcggaatttctcggcacctacctgtagtatggggcacttggtttggttgcagagtaagaaggtggaagaatgagctgtacttggttaagcagttgaaaccttttttgagcaggatctgtaaaagcataattgaatttgtttcacccccgtggattccagtgggcccgacagcgcaacaggtttgcagatttcttttgaaattcctttttcccccctccctttgcctcagcaaaagaaaagratccatataacaggttcatgtttcaattgmttnggcttttcagcaantnatttntgaagactttt

SEQ ID NO: 128 - DNA, 673 bp, Homo sapiens
  SITE (83): n equals a,t,g, or c
  SITE (668): n equals a,t,g, or c
cagctgctcgacgggtccggggccgccgggcaggaggagttggaggaggacgatgcctttatcagcgtgcaggtgccggcggncgcctttttgggctccgggacccccgggagtgggagcggcagtcggggacgcctcaactcgttcactcagggaatcctgcccatcgccttctccaggccgacttcgcagaactactgctccctggagcagccaggccagggcggcagcaccagcgccttcgagcagctgcagaggtcccgacggcgcctcatctcccagagatcttccttggagaccctggaagatattgaggagaacgcccctctccggagatgtcgaactctctcaggttcacccagaccaaagaattttaagaagattcattttatcaagaacatgcggcaacacgataccaggaatggcagaatagtccttatcagtggcagaagatccttctgtagtatattttcagtgctgccgtatcgcgacagtacccaagtcggggacttgaagttggacggaggaagacaatcaactggtgcagtgagtttgaaagagatcattggtctggaaggtgtggagctgggtgctgatgggaagactgtttcctatacccaatttctgttacccacaaatgcctttggagcccggagaaataccatagnctcca

SEQ ID NO: 129 - DNA, 308 bp, Homo sapiens
  SITE (282): n equals a,t,g, or c
  SITE (296): n equals a,t,g, or c
  SITE (298): n equals a,t,g, or c
aattcggcagagcaaactttttgaattttgttcatttttaaaaatttttttttctttgtctttgtcagattgggttaattcaaaagccttgtcctcaagctctgcagttctttcttctacttgtttgagcctattgttgaattgtttcatccatatcctgttttattcttttaacttctttaagttagttttcacttttctctgctaccttcttcagtagcttaataatcaatcttctgatttgttttctgggaaactcagagatttcgtcttagtttgggntccatgctggtggncnagtggtgatc

SEQ ID NO: 130 - DNA, 334 bp, Homo sapiens
  SITE (74): n equals a,t,g, or c
  SITE (141): n equals a,t,g, or c
aggaaagaaagctatagcaagagaggcatcccttcagacctcgtggggccaggtttgcccaccggagcaaaggntttgaaggttaagaaggtggcaccatcttccgggagtccccacttggttcctgacctctgacctctntccctgcagcaccttcaggtcttacccgctcctcttcccaggtccccctatcccggcgtctgtcccatggatgagacaaacatcttctctacccctcgggraaccaggcttcctttcctgcacaagtgggttcatcctctggatggamattccgggktcctcccagcccagagccggggcccttgggggtcct

SEQ ID NO: 131 - DNA, 185 bp, Homo sapiens
  SITE (162): n equals a,t,g, or c
aggtagagaactagtctcgagtttttttttttgtttgttttccaaactctggatatratgcctcttttaaaccaagtccctgaggaaaagcttcaccagattaatgatacacttggtgaaattagtaatggcaagtaaaggttgagatttgtgcctgctggncaagagtgagccagagcaaatgg

SEQ ID NO: 132 - DNA, 377 bp, Homo sapiens
  SITE (352): n equals a,t,g, or c
aggaaattttgtaactttttaggtattcttaaattttaaattgtggttaaaaacatgcaatagtcatttcagacattattaggtgtacagtttagaagtattaagtgcagtcctgttgttttccaggaggttagagatgatttttgtcttacaaaagtaaaagcaaatactcactaaacaacaaattgtcctttccacctctctctagctcctgaagaaccccattttactttcttttttcatgactttgactaagtattctatgtaagtgtgattatacagtgtctctttttttgactatttttattttacttggacatagtatcgtaaaggtttatccattattgtaggnattgtcaaggatgtcccccatttta

SEQ ID NO: 133 - DNA, 151 bp, Homo sapiens
  SITE (79): n equals a,t,g, or c
tccccccacggaatgattctaacggggcagtgttaccaggaccctgggggttgaagggaactytgaacctctgaacctnttcccatggacattgtctcttctgttcccccacaactttgggcccccaaccatggtttggcccccattcctt

SEQ ID NO: 134 - DNA, 353 bp, Homo sapiens
  SITE (335): n equals a,t,g, or c
  SITE (345): n equals a,t,g, or c
agctttctggtctgtaaaatggggtgataatcctcatcctacccacttcatagacttgtcaggatgcttacataatatatataaatgttatgtatacaacttactgcttgttcaggctgactgaaacacagaacctcatttcctagaattgcccttcttggttcactggaatcacctttttattgctacttgacatgaatagtttcagagctgactaaccattaattgctccagattgtttaccctccattctcctaaagaagataaggcacagccagggrtatctgttgtcctgataccatacccattcctttcagatgrggcatatattattncaaacatggngaaggctg

SEQ ID NO: 135 - DNA, 263 bp, Homo sapiens
ggacttgcctggtgtggacccaagtcgcggccacagtcatgtcagggttggttgtggcctcagatttggccgccccggaaccacccatgaccttgggctcccctggctgattgggctgcaggcgcccaggagccccttgcttgcacatcctgagaggctgtgctctgacccgcctctctcgctcttgaagacagaccccaaaggtgtcttcgtgctgccgcctcgtggggtgcaggacctgcatgttggcgtgaggcccctta

SEQ ID NO: 136 - DNA, 362 bp, Homo sapiens
  SITE (21): n equals a,t,g, or c
  SITE (30): n equals a,t,g, or c
  SITE (325): n equals a,t,g, or c
tttttcttgatgtctgtcatncagggtatngttttcttggtatcaaagaatatgaaaaaccaattataatcagaaagtgacttagtatgcatgaaattagagcatagaaaaggatagttttgagggaacatttcattcatattttgacataacctgctgagttttcctgggcccgcaatagccagtagtgtgcagcctcattttcttcagagtcagcatctttctttccccttgcaagcagtctcctgtttctatggaatagtctttgctcagacaaggccaatatgacttggtaataattaatttagcttctttgaaatggttnggtcacttttggggttttaaaagattaccaggttggt

SEQ ID NO: 137 - DNA, 407 bp, Homo sapiens
aattcggcagagattttgtccaccaggagacatttgacaatgtctggagacatgtttgattgtcataacttggagggtctggggagggggtgctcttggcattcagtatgcagaggccaggggtgctgctaaatgtcccacgatgcacaggacagccccacaacaatgtttcaccccaaatattagtgcccagttgagaaaccctgatttagatggtcaaggagcctaaggaaaggtacaagacacagaaagaggacgacttaaggtatttgttgggactgtaaggagagctgccggactggagatgtttccaggtgggtctgtggtgaaaggtaagactcatwtatggtaagctgtgtgtatacggccttaagatcacrtaggtttgagttttcccgtaatgcaat

SEQ ID NO: 138 - DNA, 406 bp, Homo sapiens
  SITE (162): n equals a,t,g, or c
attcggcagagtgcttagtccacccaactccttccctctcggctccttgaccgctcgtttctttccctgcgttacacttctgccacccactgtcaagccttagaccttgtcattaccagtaactgttgcctccgaagcctcagtttcaagcatcgcacctgnataaccaccaccacctcctatctgtccagctcacttccttaaattgcctcccttcagcagctccaatcaacgcagcctgagaacaatggtgatggatgaaaataacagcactgccgcaacacttaccccatggccaggcactgtcctaaatgctttaggaacagtattcaaaattgaacaagtgttcggtcaattgttcaatcctcacaacagcctagggagtaggcttatttttatccccatt

SEQ ID NO: 139 - DNA, 383 bp, Homo sapiens
  SITE (338): n equals a,t,g, or c
  SITE (347): n equals a,t,g, or c
aattcggcagaggtagattcagggataatccactggacttggtgatagactaaatgttaagaggaaaggggaggagtctagaatgatttccaggtaagtttaaaatcctaatggagtcaatgttttattttaatcttaaaaaattgtttacttttatgtggtatttttgtactgatttatttgaagtattaatagcttgctaaatatccttggttgagatcatttgattttcaaaatgttttgatcctttcaatacttacttccaataagtatactttattatctaactctggtccttttggttttgttctaaatcaccttctgcttacttttatggnttactaacnctttaacttaatatacccgcaggtggatgtattccg

SEQ ID NO: 140 - DNA, 358 bp, Homo sapiens
  SITE (282): n equals a,t,g, or c
  SITE (330): n equals a,t,g, or c
aattcggcagagggattaattgggggtgggggagggtccagctcggcctttgaatccatgttcattgaggagatatccacagccttctttgaatgaatattcactcacactttggattccatatcatgtgctacatgtatatcatcgcacgtcattctcaaaacgtccctttaaagtaggtattagcatccctctgtggagaagggggaagggaggctcaaacaattaagtgcccaggrttaattgatccactgctaagaaactggcagaacggagactggnatccggcacctctggactttcactgtattttccaccacactgaggttnaactattcatttcccatgtccaagtgtt

SEQ ID NO: 141 - DNA, 347 bp, Homo sapiens
  SITE (244): n equals a,t,g, or c
aattcggcagagatgaccctggggtcctggggtgcctcgggaaagtaagattctggggtttccgagggcatggatttttctggaaccttgagtggggggaggggcacctcaaaggtcagggwggacctgtagttgcctgaggtttgcgctgcgagataaggagtctccggatccttgggaagcttggraaggctgtgaaggtgttatttctggacccctggagatctctgggaagatgggagtnttgcggggactggagtcctggggatttacaggggtgggggttcacgatgcaaactctctatatttttgggagccctccccgggggaaatcttttaggttcttt

SEQ ID NO: 142 - DNA, 396 bp, Homo sapiens
  SITE (396): n equals a,t,g, or c
aattcggcacaggtggcttacattggtgactggaattatatttstgctggacagtgtagtgggctgaataatggccccaaagatttccaggtcctactccctggaaaccgtgaattttattttacaaggcagaaggaactttgcagatacagccaagggtatggatcttgagatrggagcttatccagaattatctgcgcagactctaaatggcatcacaaagtaggcagaatgcggatttgacaacagaagagaaggaatttggactgtgggaagcagagatccaaggtgattgatgtgggcagccaccattaacaggaaggaaacaagcaaaargattttttttcccccagagcctccggaaggaacccattcctgttggacattttgattttn

SEQ ID NO: 143 - DNA, 255 bp, Homo sapiens
aattcggcagagactagaacagccttgcaaattaatacaagtcccaggcccaatgcctaagagaccagacgtgggcaaagacaagtttggatggaaaggtgttatcacagagccctgtccagctcctagaattcctcaggccagtgacacttttttsctgctggccacccatgcctctaatgagaacacttgccaatttggccagcagaaagagagtaggccggatgttttcatgagcccacaaatttagaaact

SEQ ID NO: 144 - DNA, 403 bp, Homo sapiens
  SITE (73): n equals a,t,g, or c
  SITE (82): n equals a,t,g, or c
  SITE (216): n equals a,t,g, or c
aattcggcacgagcagactttaagatcatacattaaagcatgagggaaaaatatgtaaacaaataagtaaggnaagcctgtnctggagtgagtgcacaatttcttactgttggggacatgtaatcagcaaatttgggagacctctggtttaaagatgtaaccttgcaaattgagtttttagcttttttgcatgctgggcaaagaacaacaatttgngatgttgaaatgtatagtattttgttattgtagaaattgaggaaaaatagggacttctacccattataaactgaaccctgtaagtatgatcacttcctcctttctacttactcttcttagcactcccatacccaaactgaggaatgagtgaaagggaaaatgaaagtttaggggcactagatggtct

SEQ ID NO: 145 - DNA, 652 bp, Homo sapiens
  SITE (601): n equals a,t,g, or c
  SITE (603): n equals a,t,g, or c
  SITE (630): n equals a,t,g, or c
  SITE (635): n equals a,t,g, or c
  SITE (648): n equals a,t,g, or c
aattcggcacgagaaatgcacaacttagccaggcgtggtggtgggcgcctgtaatcccaactactcgggaggctgggttaggagaattgcttgaacccaggaggtggaggttgcagcaagccgagattgcgccactgcactccaggctgggcaacaagagcaagactctgtctcaaaaacaacaacaacaacagacctctggggcagcaaatcagaaaacacaaaataaaactggaaaagctcagtcttgctttcctccaagtgcccattgactcacagctggctctttaggatttataaccaaagagtcaaggaccagcttgtacagagtaaagtattgttgttttgcagagggagctaagaaacagctccttgattcattggatctacaattaattattgagtgatgctctgtgttctgcactatcctaggctctatgatgtacagatgagacatagatagagatatataaaaacatcacatttccatctytgccgtccaaaaacttataatctatttgggaacatatwcmgagttgaragtcatgacagtatccggraaaatggyctaagartgatagagataataaaatttggcagngnatagaaagtctggggcccgggcacagnggctnaaacctgtaattntagc

SEQ ID NO: 146 - DNA, 446 bp, Homo sapiens
  SITE (41): n equals a,t,g, or c
  SITE (409): n equals a,t,g, or c
aattcggcacgagccggaggaggagccgacacccgtccgtnagctgatcccgccccagccccggcgggagtcccgggtccccttcccactgcgcgcggatttccctctctgaggaagtttatccttgtgccttctggaggatttctctctagctcgactcactctggactgactcgctccctggctttctcagttcgttttgggagataacttgttttgctccaagccgcatccgttgaccccttacagtcggatggtctagatgactgaatggagttttgagttggacttttgtgtccctgacggagttgggcctgatcccagagcactkggggtggggaggaggtgttamtgtaaaatgcaagttggataaaaggaggaccttttgccaagggcccaatgagtgganaaagtttactatcaacgacaagttttccctcaaaaaa

SEQ ID NO: 147 - DNA, 365 bp, Homo sapiens
  SITE (211): n equals a,t,g, or c
aattcggcacgagatgagttaagacatgttaagttctcaaacacatgctctgaagggaaccacgtaggaggcactcaataaatcgcagctgtcattgtcgttgtattgtccttgttattaacctgcctggaagtcagcagttgttcttcattgacttaaccatctgacaccccagaagagatagagatatcaccctaatgaatgagaggangtggtaataaagagcatatttgtgaaagcggaatgaaatctgggattaactgaagaaacgccgcagatttattcaacctatgttgtgctattccctactgaataatatttatgataccttacccttagatgtcaaagccagttcccctgatctt

SEQ ID NO: 148 - DNA, 358 bp, Homo sapiens
aggattttacctttatttgaaattctccacaacaaaaagtaaaataaataaataaaagatgtatgtctcttaaatattttataatgaacataagagctgtgagaagttctgggtagmagacccatttgtttgtatgagctcttccaaacttacagatcactgaactattcttttcaaggaacatctgtaaatttctctcctggacgctttgggaatggctatacattggtagaaccaatgtttttccatgtataattgtccatgataatttctgtcttatagcacataaaaaatccatctacatattgaaaaacatgaggtaaaatgtggaaaatgtttaaaatataaatgtttaaat

SEQ ID NO: 149 - DNA, 525 bp, Homo sapiens
  SITE (455): n equals a,t,g, or c
aattcggcacgagcccattaagcgagccatcactgaacattttccttgattgatgctttaagcttctgtcactcactctttgaaaatatcagactacagggtctgaagcaggtttctgcaatattctgcagtacctcatgggtacaaaagagacacaggaatatgccacagcatctagatccaattcttagtgaaaattttgttctttcatctgtattctggtcagccagcttgaagtagacacaggcagatgcttggagagtcgaaattatagccgaatgatatcacagagtagttaaataccagccaagctgtggttgcagcatggcaactttacaagccgggcaggttagcatggatgctgtgaaaagtgacccctctatctgaaaaagggttttgtaccttggctggcattagtcacttttccttggttkrtatttacagctttctcttgnccttgtatcctttgggtaacacaccgtgagtgagagcagaaaagstttcctataaaggtagcattttatt

SEQ ID NO: 150 - DNA, 582 bp, Homo sapiens
  SITE (553): n equals a,t,g, or c
  SITE (556): n equals a,t,g, or c
  SITE (562): n equals a,t,g, or c
  SITE (574): n equals a,t,g, or c
aattcggcagagggagtcttctcctcccaggccagaaactgctatgtaattgacatgacccaatacaagatgaaaatgtgagcccctgatcaaaaggtattacaaatttcacaacagtgacagcaggccttagggccttgccatgtatgggggccctgtgcagctacatgggacactttgtaagccggccctgctaacgggcgttgctgtgaatgcaaggtagaccagacgcagcctcagtgctgaggagagactctgattgaaaggaggcgctctgcctgagtagttgctatttattttattttagggtccagattgcttcatgggcaagtggccaagtcggcaccattaaaccagacaggcactgaccacggtcccagctcacatgcagctgcagggcggctgscttccacatctttggggaragatgctgatttgkgctttgkgktttggkcctaatagaaaataatcatcctgkcacgtgaatcgkccacaragctgtkgmtctkggaacttcctgtgagagaacagggctgacaaactggccttttgnggnacattnatgcccttgcantggttctg

SEQ ID NO: 151 - DNA, 358 bp, Homo sapiens
  SITE (273): n equals a,t,g, or c
  SITE (352): n equals a,t,g, or c
  SITE (356): n equals a,t,g, or c
aattcggcacgagtgatattctttgagcagtgtgacctgttagaggtgcccagtcaggtccgatgaaaagccctctgatttgttgaaatagtgcattagtaaagtattatagtttattttcacaaagctagattagttgttacatgttggtttttgttttgcctagccctaacaagtatggaggtgaccttgatgtgtctatagaatatcaggaatatctggctgggtgggtggctcacacctgtaatcccaacaatttgggaggccgaggtngggcggatcacctgaggtcaggagttttgagagaggcctggccaacatgggtgaacccccgtctcttacttaaaaattnccanga

SEQ ID NO: 152 - DNA, 321 bp, Homo sapiens
  SITE (259): n equals a,t,g, or c
  SITE (297): n equals a,t,g, or c
  SITE (304): n equals a,t,g, or c
aattcggcacgagaaagggtccatattagcttccaaccccaatttgtactgtccacttaaagcaatacgttaagaaagatttcaaggcttcatgctggttcactgagaaagagctctggtccatcatgtattccacagacaagggaagggaataatggcatgcattcctgacatttccttttcctggtctagcaccatcctaaatctttaagagagaagagagacctctcatgtggccctcccttgagcatacactggnctgttggatctggctgtgagttatattcagagacctgncaacggncaattggatgtgataag

SEQ ID NO: 153 - DNA, 321 bp, Homo sapiens
  SITE (243): n equals a,t,g, or c
  SITE (258): n equals a,t,g, or c
aattcggcagagtctggaagcccagaggcaaggtgacttactcctacaatctttgtagcagaacaggacctttgtagcagaaccaaaacctcccaactcccagttgacatggtagccaccttctctggtgagtgaagggattccacatccccagcagtgcagttggtgagaaggggcagtcagtcttcaaggatttgctccggtgtggcttcattcaatgstgcccacctctggtgcagcctncagctttgcctctgntctttgcaatgtagcctagaggtcttttttctccttaacaggttttattccctttgttcctcc

SEQ ID NO: 154 - DNA, 374 bp, Homo sapiens
  SITE (361): n equals a,t,g, or c
aattcggcagaggaaaacctttcccctgttgcttccggattgaatcatagttaggaaagcttttcctattcccagcttagaagaggaattcacccatgtttttttctagtactgattttctttattatttaagtttagatctcatatctatctggagtttatcctggtgaacaatgttaggaagtgatctacttagattcttttttatatggctacctacttgccccaatatttttttttgaagtccagtgaaaataaaataaaatatcactttttgtttacatgtctgttttatgtagttctgggttgatatagatatttcagataatagtgcaaacaatattataaccatgagtaaggnaaacacaaaaggg

SEQ ID NO: 155 - DNA, 365 bp, Homo sapiens
  SITE (35): n equals a,t,g, or c
  SITE (350): n equals a,t,g, or c
  SITE (356): n equals a,t,g, or c
  SITE (360): n equals a,t,g, or c
ttgttctccctcaaggccttcacccatgctagggnagtcacctggaatgtcctttccattacccctgctgtaatgcccagcacagaacttgatggcaggcctttgcatggtagcctgaagcgatctcacccttctaactgggtttggccacaggcacactggctcatgcttacctgtgctgcctgtggttatagttatgcgaattgtggttttacatccctaaaacagaagggcacggtgtccaggggatagcacccagcccaacttcagaaagacttcaggcaagatgtyttaaccyttgtcttgttcttgtttcttccaggggaattccaatgcccatttttggaggncttttncccnaccct

SEQ ID NO: 156 - DNA, 326 bp, Homo sapiens
  SITE (249): n equals a,t,g, or c
  SITE (311): n equals a,t,g, or c
aattcggcagagtgccagtgcgctccggcatgggtgacagagcaaggctactgaaaaaaaagaagggaaatgccacctggtttccctctgtktcctccccgccaccatctctgcccctgtggaaggcagagcttcggccttccgtratggaaaccacttcctctacactgctcctgtmacgtagcctccgcgggaaggccgcccctgcctcttccccagcgtggcaccatcctctccctgtccccccgntttcaggggagtgggggctcccagcagtgggcagctgagctgaggacttcagcccccacagnaaaggaaagcgctgg

SEQ ID NO: 157 - DNA, 341 bp, Homo sapiens
  SITE (321): n equals a,t,g, or c
agaattttgtagatttagtcagggcaaattactaaagaaataacacacgtgaaaaattacagttgagagttgctacaatatattatctaaaacatctagttttttaaaattatgattatgtctgtaaatttattatggttatgtctgtaggaatggctacagaaaacaaacagaaaaacaaacactaatgggacaaaaaaaacaggaaagggtggttcatattcagggaagrtaatcagtcaatagaaactgtctctgagagagcctagatgttaggtttagtaaacaargacttcaacacagctattatacatgtgttcngggaaatacaggaaactttg

SEQ ID NO: 158 - DNA, 361 bp, Homo sapiens
  SITE (354): n equals a,t,g, or c
aattcggcagagcaggggttcttattgtaagtgtggattcctggtccttacgttggacstactgaatcagaacctctgggaagggcatggagaatcagcattttgagcaggctcttaggtgatttctatacatattgaagtttacaacctgttagggtcacattgtctccccgatttcccatttggtgctacactaaggaaaggctaacagtcactttcctcttctttccattacatacacagattttctacaactgtggaatcctgacaaaccctctttgctttactttgggtggagaaactgaggcaatttgcttcttaagcaggcttcattttacggggataattccccgngttcagt

SEQ ID NO: 159 - DNA, 361 bp, Homo sapiens
  SITE (285): n equals a,t,g, or c
  SITE (297): n equals a,t,g, or c
aattcggcagagctttgttgtttcagggaggggaagagctagctgacttggctaactttggattctgccccctcycatsagtaacgtttcatttttctccaaataaaatcaaaattttttttttcctggatcaaagaatactgggtgatttttaccaatggttggggaaagaagggggaaaggaggactggctttgagtcatccatgtgctgtgggggtgtgtgatttcttccacttcataaatgtggggacaggatggttttctttcgttatagaaagaaaggntatacacatctnctactatatactgtaaaaagccatatgtagaatgtaaaagcatgggggaaagttcaccaccacg

SEQ ID NO: 160 - DNA, 228 bp, Homo sapiens
agtgggccctgtgtgtataggcccagatttttctctgtgtcctttattaccagctctgtttacagatccctggcaggcgggggcatgaggctgccacggggaacacaggtttccttgcacctggccctttaccctgtcagctttgctktttkcatgtgctctgacgccctcccattaggtgcatccaagctgcaatgcccacttcctcctggcaggggggaccgccag

SEQ ID NO: 161 - DNA, 426 bp, Homo sapiens
gctcgacgaataaaaacaagacaggcatcaagtctggtacagcttcatttatttcttactcttcctaccgaattgagtttgcatccaggtrctcctcatgcctccgttggcagaatgatgatgtaatgaacgaacagcatttacagtaaatgacagcaaattgctctgtaattcaagggctaacccatgtgccacacaatgatcttttgatgtctgtgaatttcttcaaggtgggtggggaagctttttgcttgtagggaaggctctggatggactgagcctctgacatatcaactgtaaatcctggagtcctggggctttattcggaggaagaaagcaccttctacaggcagcagtagagtggactgtcccagaatcgagcccactgccctgagaattggactccacaatggccagttggacatt

SEQ ID NO: 162 - DNA, 264 bp, Homo sapiens
  SITE (234): n equals a,t,g, or c
  SITE (257): n equals a,t,g, or c
aattcggcagagtgattagggaggacaagaggggggctcctcaggtgccaagagccccctgttagttcatagggtgctgattacatggtaaattttctttctttttttttgagatggagtcttactcttgttgcccaggctggaatgcaaggcgtgatctcggctcactgcaacctctacagtatcctgggttcaagcaagattctcctgcctcagcctcccaagtagctgggnactgcaggtgcctgccaccatgnctgactg

SEQ ID NO: 163 - DNA, 221 bp, Homo sapiens
tggccagggtcgaggtccgagttcctggccgcgtcccaaggatcggattccgggtctatagttctcatggtggttcagagtgggctgaattgggattggagtctggaatccgcatcgtggttctaagtccgcgctattgggatggaagttgggaatccatgttgtggttttaagtcaaagcccgaattgggaccggagtcggaaatccacttagtggttct

SEQ ID NO: 164 - DNA, 319 bp, Homo sapiens
agctaatttaaccagcacatccatttcgtaaaagacatcacacattgtcatttgtaagcctgggactttaactatttctcaacttttttagctgaataatttttctttttaaaacaaaactgaaatctgttgtatccattttagaatttatctcagtagtttgtatattcatatatatgtggtgagtttaagaagacgtatttagaacatttttatcttgttagcaatttgacatagaaaaatgaaacattaatgtttttattgtgagycatgtcactggcacakttttcctctagtatcmtgtgtggtgttaccctct

SEQ ID NO: 165 - DNA, 358 bp, Homo sapiens
  SITE (316): n equals a,t,g, or c
  SITE (330): n equals a,t,g, or c
  SITE (350): n equals a,t,g, or c
aagatggtaaggaaggaggttcagaaatcagatggaccaaacacatgaaaatstttggtcattttaaaaagatgacttgcaatatggcaactgggccataaagagttaacaagaggagtatggcatgagtataggcctttcaaagtgaaagacaggaagaagcacaaaatacgtgttggataaaataatttcttggtgatgacattagcatggaatagttaccatcctagagaaggtgctagaaggtacagggggaatgattaagggtcctccaaggaaaggaaatgtgtgtttgtgtgtgtgttgtgtgtgagtnatgtgtgtgatacnccgtggtgtggttatggtanggtgatac

SEQ ID NO: 166 - DNA, 270 bp, Homo sapiens
gaattcagcacgagatggcctcatcctgtgtcccagctctcattacccacactgaggtctccagcctgggctgcaaccctgaaccgcagaccccacatccagcccctcctgactcatccacttggtgttgaatttgatgcaggccagtgcagccacattggaattctgcatttttccctcttcaaatctctccttcaaggctttctcatcctcccaggcccacggtcagtcttgtttctgtcctactcctccttgagtaagacctctggg

SEQ ID NO: 167 - DNA, 302 bp, Homo sapiens
aattcggcagagcacagaattctaggcagtactgctgtctgttctataaattggatgtaaggagaaggctgatttataattcaacaaactcccaaattaggcatccctttttcccccttgctgggatttaaggaggatttttttctaataactagccaccttattcttgatcattcaaaatctgggtgagaattttcttaaaagtcttagacagatatatttgaaacgtaattctatattgggaacataagtgattatgccacacataggcataaacaatgctttcatgagttcaattatac

SEQ ID NO: 168 - DNA, 276 bp, Homo sapiens
  SITE (193): n equals a,t,g, or c
  SITE (239): n equals a,t,g, or c
agaaaagacattattcagaaagagccagttgggagagagcaggcacacagggttgggtgttcttactctgggacacaggtttcaggcttttcggcttgaaggtggggttttgccagggacccgcacctgtytgcctagkaatttctctgcctcctattgctgtcattggcaacatgctgagaccctgtctctnactagaagtacaaaaaaaaaaagcccagcgtggtggcgtgcaccantggtcctagctgcttgggatgctgagttcagggggtt

SEQ ID NO: 169 - DNA, 621 bp, Homo sapiens
  SITE (521): n equals a,t,g, or c
  SITE (573): n equals a,t,g, or c
  SITE (575): n equals a,t,g, or c
  SITE (596): n equals a,t,g, or c
  SITE (613): n equals a,t,g, or c
cactttaggtgacactatagaaggtacgcctgcaggtaccggtccggaattcccgggtcgacccacgcgtccggsyacrgtgacacctcctggcttggcaagagaagactggaaaattataagagcactctctgagattgctggaatgactcttccatatgatactctggatcaagtaaggaacagattggaagaagtctctcctaatcttgttcgatatgatgatattgaaggggctaattacttccagcaagcaaatgagctctcaaagctagtgaaccagcagcttcttgctgacccacttgttccacctcagctaactataaaagacttctacatgacagattcaattagcagagcctcacagacaatggccaaatgtgtcaaagctgtcacagagggtgcccaggcagtagaggaaccatccatatgctgaagcttctactaggatcccagttttgccgcagataattaatggrcaactgtagtgcagtgatcctttacaggtttatttctttgtnaaaaaaattaataataatttggattcatgtaatatttaaggttatactatgncntttttgaaatgttattggttntcacctttgcagtttgnaaacatgt

SEQ ID NO: 170 - DNA, 287 bp, Homo sapiens
  SITE (1): n equals a,t,g, or c
natgtaaaccataaatacatatgtctactatgtacccacaaaattaaataaaaataaaaattatagtaattattctctagtatttcaactgctacctkacttgctatttctgtgctacctttcatagtagaattccttaagaattttctktacttgctatctgcagttcttttacttctatcatctctacttcagtcaaatattcctcccattttccaccaaaactgtccttgttagtgtcaccagcacccttcatgttggctaaaatccagtgggttaaatttttc

SEQ ID NO: 171 - DNA, 875 bp, Homo sapiens
  SITE (501): n equals a,t,g, or c
  SITE (796): n equals a,t,g, or c
  SITE (867): n equals a,t,g, or c
aatcgactcactatagggcgaattgggtacgggccccccctcgagttttttttttttttttttaagacagagtttcgctcttgttgtccaggctggagtgcaatggcatgatcttggctcactgcaacctccgcttcccgggttcaagcgattctattgcctcagcctcccgagtagctgagattacaggtgcctgccaccatgcccagctaattttttgtatttttagtagagacggggtttcaccatgttggctaggctggtcttgaactcctgacctcaggtaatccgcccaccttggcctcccaaagtgctgggattacaggtgtgagccacagcgcccagccctgctgtacttttttaaaggagcaatacctttcacaccccaatagcaaaaaaggaagagcagtctatgaaagacccatgcatcttacagcaaagcaacatagatatgaagcaacatgaatgacagcccacagtgaaggtgaaacaacatcakknaaagaggacctctggcaaaatctgtgtttccatgtggactgccacatcaatccaaccatgctccctgttataatcatagtgtgcatttggaagatggtgggttggggacaaggatatacttgtggctatgggccagagggtaatgatacatgtgcctggatgagggtgcactgtaaccaatagctcctatcatccccagtgtgttcctaaatggtctgacctctggctgctcttacaagcctagtaagcacttgattatggctgcctgtgaattgaaatcatataaataagcccngacgcgtgggcgacccgggaattccggaccggtacctgcagtcgtaccttctatagtgtcacctaaatagntttttgaa

SEQ ID NO: 172 - DNA, 483 bp, Homo sapiens
  SITE (426): n equals a,t,g, or c
  SITE (447): n equals a,t,g, or c
  SITE (471): n equals a,t,g, or c
  SITE (480): n equals a,t,g, or c
ggcctgttctctgaggttctccctgcaggaggatcgtaagaaaaaggaactgaactaatgatataagcgattttctaaaaatagccctgcacctctgccctagggaggaagggaaaggcccattcatctagctgcatcctgaagtagagcgatagccagtgacagagaaggaatacaaggataatgaagaggctcagggattacaataagaaccgtgtggccgggcgcggtggcttatgcctgtaatcccagcactttgggaggccaaggcgggtggatcacgaggtcaagagatcgagactatcctggccaacatggtgaaaccccttctcttctaaaaatacaaaaattagttcggtgtggtggtgggcacctgtatcccagctactggggaagctgaagcaggaaatcgcttgcacccagtangcggaagttgcagtgaccganatcgcccactgcctccaacctgtnacaaaccangac

SEQ ID NO: 173 - DNA, 436 bp, Homo sapiens
  SITE (152): n equals a,t,g, or c
  SITE (376): n equals a,t,g, or c
agatgaataattaaataattgtgcatatatatatatatatttacatgtggtcattaaaaattgtgttacccttctacatgctaacatgaaaacagttctgcaatatattaatttaaaaaaaaaaaaaaaaaaaaaaagggcggccgctctanaggatccctcgaggggcccaagcttacgcgtgcatgcgacgtcatagctctctccctatagtgagtcgtattataagctagcttgggatctttgtgaaggaaccttacttctgtggtgtgacataattggacaaactacctacagagatttaaagctctaaggtaaatataaaatttttaagtgtataatgtgttaaactaactgcatatgcytgctgcttganaattttgcttactgagtttgatttatgaaaatattataccccggaactagtgaacccaat

SEQ ID NO: 174 - DNA, 394 bp, Homo sapiens
ctaaagccgttaaccgtaaagacactttcaacgttcgctttctcgttcttcagatagtaatccgtaacttgatccaacactttttgcgtccgctcttgcgtcgcgccagggctaactgaatcatggtcagaaagacaccctgatcctcttcaggtaagaaggaagacggaagacgtaaaaacaacaccaccattcctgcaacaatcagcgcatagatcagtaaatatcgtcctgtggatccgaggattttgccgacgctgttggtgtagtggttaacgctatgatcgaaggtggtattaaaccaaccgargaaaccgcccttatttttcgtgatgttcagcagagacgggtttaagcagcgttgcacattaacggaggggtaaggaatcaatgg

SEQ ID NO: 175 - DNA, 472 bp, Homo sapiens
aaagacaaatactgcatgttatcataagtgggagctaaaaatgttgagttcacaggagactagaactgtggttatcagaggctgggacgggcwgckgcgggaggaggataggctccagggtgatgaatggggatgaactgggagttacttgcttgagttggggtttgagttacaggtgtttttctggcttcagacactggagtctttcttagttctgtctgggattttacctgcactgccacattctgctttcctgtttcctgtaacttttctaaggtgcatttcttggtttcagttttcctcttgttgttgtccttctttccatcattcttagttacagttattcctttgctatagtcccktctcacctctttgggaggaaaacttcttccttggtctctgttcacttctcgtgtcttaatgttttctttgaaggtaaccactggcttctctcctgtgtcacagttgttgc

SEQ ID NO: 176 - DNA, 358 bp, Homo sapiens
  SITE (349): n equals a,t,g, or c
ggtgatctgcccacttcagcctcccaaaattctgggactgcaggtatgagccaccatgcccagcctaaagaggtatttaaaaagtcatttttgataagaaaatgtggaacattattttggtcttttaggtgtcttgaacatagtctacctaatcatctagacaggaagataattaacctctattttaacaaacatttttcttcttgaaatgaaatattcttttagataccaaaatgaattaaaattgagtgattactattaaagctgcaaaattatttgggagactgagatggagggatcgcttgagctcaggagttcgagaccagcctgggcaaccgtgaaactttgnctctactga

SEQ ID NO: 177 - DNA, 693 bp, Homo sapiens
  SITE (597): n equals a,t,g, or c
gctgctctgatagaccaaggtcgctggagcaaccgtactgctaaaggataagctcttcaaaatcaaaagggacagatttcttaagtttctagtttgttttgtgtttttacatctatttctaccatacgaaagagtaggatggtgagatgcatttctaaatatttttaactactcagtctggatggttaggcttcaagaaaaggaatttatttagtctgaaataaagcaattttgccatttaaaattgaattactttgtagtttaatgattactattgagcaaacaaatctttacagtaatataagtcagcaaaagttttttaaaaggtttaaatccctccttccttacatctatttcattgcttttttaggtttgggaagtaaagcaccagaggaagcatgtgtaaatccttgtataatcgcaggctgtaagtctttagcatctcaggaagttactaacttcaaactaagtatataggtagagtttcttactaaatctagtgcttcttgaaccacaagtagaaagcatttaaaacatgaatgttgttttgtgttttttgaagtttgtaaatagaagacttgttgatgatccgatggncarggtatttttcycttgggkatggtattttagttattyccycgtgatgcataagtgaaaagagtgaagtttctcagaatgagcaactgtcatcca

SEQ ID NO: 178 - DNA, 584 bp, Homo sapiens
  SITE (522): n equals a,t,g, or c
  SITE (582): n equals a,t,g, or c
gatctggagtaagaggcacctactgaaaccggaaggtggctgagaaggttttatgtgaggtgtggacgggaggctattggactagaaggcattagttggtctgttaggacaaagtatacaagcagcaaacgcggtagatttatgtgtggtaggtgaaggctgtgaatcttttatgagtagttgagcaagaacagttgtctgattctgcggtgtcggagagtggagggtctcaggtagtgtcttggtcaggtttgaaggttaatttactgctagtggagggccaaatactcaaaagagtttttaattctcactactggggctgatcctcctcctacactccacccctcctgccatccctgtgacagttcatctcgttttgcctcagcagcacaagaactcactccctccgaagtaatggcatacatatkgtttgcttttgactagatggcagtcaggaatcccttaattctttatgttaaaaaaaaagtgttggtttaaagacaacatcagaagatactctcngaaaatctgccctccaggggagtttctcagctgtcatgttggggcatgtgtaatatagcnta

SEQ ID NO: 179 - DNA, 624 bp, Homo sapiens
atctctgtaattctttattaaaaatactgctgtacacatagagactgaaaacaggattaaagatgaataacacaaattgggtcatgacattagaacctaacacactggtgctttttagggaagttgttgacatccaaatcacagaaccaaggtcaaaagcaaaatacaaaggtaccctcaaaaatatttacaatgaagtaaatacactaacagaatttaaaacaggtacaaaatattgaaatgaccaacgttacatgatttcaagggttgtcctttctgtgcttttatctgtcacgacaggaaggtgtggaaagtttatatccttaatttgactactcttggatattaaaatctttctattaattaaaaagacttttagacaacctcttaaatggrattacactatggaaaacagggctcccccaaaaacacctaggcagaactgagagttctttgaaaaccattcccaataaaaactaaatgaaaaataaatataaaacaaagcttaaaaaaatatgcattacctgacaccaaccttttctggctgacaatatttattcatgaaaacatatcagctgtctaccttttatatgcaaaccaagtcctgaggttaactaggggctg

SEQ ID NO: 180 - DNA, 574 bp, Homo sapiens
agatccagcggcttgctgtgagtccgggagcaaaattgtacccatttcaaagatgtgatgactaaagtctcgagagggccaaggctcgccaaggttgctctgtggtgacagctttacctccttgctatgtattctcagatattgcaaacggacgagagaaaagtggagaatgaatcctggagaaaacaaggtcgttcgacgatttcgacacgtcgcatccctgagagtctctcgtgtcctgatcaactcgagaactggaggcggtgacattttagatgctgcagtgaaagccacagagccacggaaggccgagactccaccatgtttgtgatcttcacattcagcaaactcactcgcactctgcctcatcttatctctagaatgtattttaccacactgtgtcccttctttagtgggaatgtctttggccaaaaataatgaatagttctgacctgacttgctaatacccagtgataaaaggatggaatttgttgggaataaaagaaaactaagcttacaaacgagggccctgatgctccgttccgagcttggtcatctaatttccagccaaaaa

SEQ ID NO: 181 - DNA, 365 bp, Homo sapiens
ctgtgttcttccaccggagttaagggaaatttcacaactccccaggggctaatgtggagttcattttcacttactgctgaatcaactgaagttcctttcagagtcttttcctagagtggaaaagtatctgagctcttcaacctactattcattagtgctgagagacaaaaatcatgttagagtctataatgtaatggagcataaaacatttaagttatgaatctgcataaaatgtgtaaaagatgaaaaaacatactttaatgtttgtcagtacttattgatcagtgaaagaacattttcattaatgcctcagcctgtgaatggatgtcaataaakatgagtgagaaggatttcatatacaaaaa

SEQ ID NO: 182 - DNA, 645 bp, Homo sapiens
  SITE (461): n equals a,t,g, or c
  SITE (567): n equals a,t,g, or c
  SITE (606): n equals a,t,g, or c
  SITE (628): n equals a,t,g, or c
ctggaaaccttccccggaatttycgggtcgacccacgcgtccgctcagagaaagcattttaacttttatagtaaacaataaaaaagcctcataaagcttctcacaacaacttcattcgtttcagaagttaagatatattccttatgaataccaacattgtgacatttgtgttgccaattattttctctggaatcattcttttaacttcacttcctgttgtttgggaagactttgcagagaacatatttttaataggctataatcacacgggcaacagagatcttggcaagtagctattaacggtatagacagaaacttggagtgtgatggttttagacttcctgtgcttcatgatgctattttaatgcactaagagtataaactaaatttagatcctgctgactgktgctggagtgagtgcatgtctcttttgcagacaatgctagatttartttctgggnatttttgcaagctgggagtgcagtttgaagctccagccttctaagcatttttatagctatacatatggatttcatgactgctttgawttgcaactgggcacttaangtttggtgggtcttaaagcgggtactggcacttgggggnggttcgcggggggggtcattgnattttaattttaataaa

SEQ ID NO: 183 - DNA, 395 bp, Homo sapiens
ctggagtagaaaatctttcacacataaaacttcaccattagctaagataaattcctttttgtgtggaataacatgattgtaaatataaactgcatttcacaaataacatggatttgaaatacttctcaatgtttgagtcatttacaaactgtgtaaactgagacctgggagaccatctaaatcaaaatcctgagtggaacagtattcaaggtaggctttggggacagttcccccaaatgtwacactgtttcagtagtgttggtacccatctataatacaaattgtttttaaaaataagttttattgtgtatatatcaggtatattacatgatgttatgggacacatatagatagtcmaaatggttactatwgtgaagccaaataaaccatttccc

SEQ ID NO: 184 - DNA, 674 bp, Homo sapiens
  SITE (400): n equals a,t,g, or c
agtggtgagacacatccagtggacgcccagggagatggaggtgtacatcaggcacttggagaaggtgttaaggcgctatgtccagaggctgcagtggctgctgtccgggagccgccgactgtttggcaccgttttggagagcaaagtatgcatattgctggacacgtcagggtcatgggcccctacctgcagcaggtgaagacagagctggttttgctgatttgggaacagctgcggaagtgctgtgacagttttaacctgctcagctttgcagagagccttcagtcatggcaggacacgctggtggagaccacagatgcagcgtgtcatgaggctatgcaatgggtgacccacctgcaagctcagggcagcacctccatcttgcaagcattgctgaaanctttcagtttccatgatctggaaggattgtacctcctgaccgacggaaagccagacacaagctgcagccttgtcctaaatgaagtccaaaaactcagggagaaaagagatgtgaaagtgcacaccatttccttgaactgctcagacagarcggsggttgarttcctgaraaagctggcttcctycaccggcggacgctatcactgscctgtgggtgaggacacactctccaaaattcacagcctgctgamcaaaggcttcatcaatgaaaagga

SEQ ID NO: 185 - DNA, 744 bp, Homo sapiens
aaatggtcgatcaaaaggaaccaactatattgagcaccatgcgtgatcatctgatcgttactgctaccttgtgagttaaaggctactcttctcattttagaaatgagaaaagagatgcccagagaggacgagtaacttgccttaggtcacacagcttatattaatcacaataacatttgccgcaccttctgtattttttttaagttgctaagcttttggtgcatgtctggcaccgttttagttgtatattatttcatttaattgttaaaatgaccttctgatgcaggtatttgtagctttgccattccacagatgaagaaacagatgaaaggactgaattgttcaataggaaggagcagaatcaggatatgaacttgggttggcctgattcttggggctgcattctttccataacataattgcttgctgtgatgtcctgggctactctgccaggggtggttagtggagtgaatggagaataatttagacaaggtcagtaactcccatgccatctagaaattaaaagtttaaaaggcagagtctgcaactctccttgatttctacagaaataaagatgatccctcctgtgacagtgctaagtgacaattctgagtgtaaatgcgctttttggcacaaattgtcctgtcctaatagtcttgattataattataaaataatgggtttctgaaaggcgcaagcagttctgggaatggcaataaaggtttagaaatgaaaaaaaaaaaa

SEQ ID NO: 186 - DNA, 432 bp, Homo sapiens
aaaaaaggaaatagacattataaatactgggaaaaaaagaaccagaaagacctttataggtgatatgcttgaatacctagaaaactcaagatatgctaccaaaaaaaatctttcagacacctaaaagaatttagtaaggtggctaaatataagatagcatacaaagattagcagctttyctttatgtcttcgtaaattagaaatcaaagttagggggaaaatgtcatttatctttgtaccacacatttaaatatacagtaataaatatcacaagaaaggarcagaatctatgtgaagaaaattgtgaaatttttattaaaggrtagggattaaagcactagggtggatagtacaggrgataccctgtttgccaaataagggaaatttttggatccaattaccccgtyctttaccttgggaatccggtgttta

SEQ ID NO: 187 - DNA, 348 bp, Homo sapiens
  SITE (195): n equals a,t,g, or c
  SITE (218): n equals a,t,g, or c
  SITE (337): n equals a,t,g, or c
ctagactaagctgggctgtaataacaaacatgactgaaatttctgtgacttcatacataatttttttttttctttcccacacaaatgtcacactggatgcattggctttctaggacatcttccttttaagcagtgactcgggaatcgaggccacttccatcctgtaacgacgccatctggagcatgtggcttccnggggagcagtggctgaggccctncagttggcttctcactgctacagtccagagttgcacacagcacttctgctccatagtccatcagccaggagctagtcatgtggccaccttcgctgcaaggatccaggaaggcagagttncggagatcctg

SEQ ID NO: 188 - DNA, 260 bp, Homo sapiens
  SITE (174): n equals a,t,g, or c
aattcggcacgaggaaaacgtaacactaatttatatttccaaagcaacatataaaaagtatccatttgttctacttttgccagcattggacaaagtattttttaaatcttctctaatttgttgtgcaaaatatgctatatcaggagtgccctgaattatttctgtgcaatatgnaatatccacagttgtgcagattttgaaccactggatraattcttctttaaggaatccatctctgccatgttctttgatccattttt

SEQ ID NO: 189 - DNA, 303 bp, Homo sapiens
  SITE (213): n equals a,t,g, or c
  SITE (276): n equals a,t,g, or c
ccgcagtgaggctgccgctgaggcctcagcctgtcccatggaaagctctggagcccaggtggccatcggtgttgttgcaaattaaggcaagagcaccaggctttgtatcacctgttcaagaccaaccagaagtaagggagggaaggtatacacgtgggggaggaagtttccttccatctcaggtggatttccaggtaagaacagagctgtaanccattcttacccattattcagcagcttgatacttcccagcagctgtggggggacagggcttgnaaccccaaagaggggatctgggtaata

SEQ ID NO: 190 - DNA, 500 bp, Homo sapiens
aattcggcagagactggaactttgtgggaataaaacgctaggtatattcactctctacctcttcactaagtggctctttaggttgttggttgacttagtgcctcgtcaggggccaatgaaagggaaggaggtgagggcgccctgacctgggaaggggtaggaccccatgtttagggaagggttctagcagtaactctgccacgggcacttccttttctaggcctcaatcttcccagccctaaaacaggggtctggagagtatcagcacattcccatcacaggcagattccccgggccgggaaagtttctggagaaggcttttgcaataaacctctaagctgcttttctaatgacaagtttgatttacttaaactttgacttagctcagtgtggtcagtgtcattgtccttaataacaatgtaattgcttttattgaaaaataatttcctaaccatgcatgtgtgctgtagacaagtctttcccaatctgagatctgtgaa

SEQ ID NO: 191 - DNA, 544 bp, Homo sapiens
  SITE (186): n equals a,t,g, or c
  SITE (543): n equals a,t,g, or c
aattcggcagagccacttatgaatcaagtatattctgacaagtggaaaaggatatgaatgctctcctgggtaaaattaacctcctttgcatttcattctcacattctcgcacaaaatgaattatcaagatggattttataatagctgattctctgaagaatccctgagactttgtatgattctttngtatagcagtggctttcgatgtgccaagtctacctcctcccatactgggacactcaagcaacacagatgtacacgggaattttgggtattctatactgagaatactgcacacatatcgttagtcatcttaatgttgtaacttaccaaactcttaaggtttgcaaatgtgattttgttggcatctagaaccagtgtattttttatttatgtctgaaaaataatcattgtggggttttaaaatgaaaaatcatgtagctaatgcctatccatagatgaaattgttatgttgggaaaatgtgtacttaatctttgctttagtaaaatgattattataaaaaaaaaaaaaaaaaaaaattnc

SEQ ID NO: 192 - DNA, 427 bp, Homo sapiens
  SITE (69): n equals a,t,g, or c
  SITE (427): n equals a,t,g, or c
aattcggcacgagaactggtagtaagataagcacaaagtcattggacagtgactctgccagacatgggnggaagcgcttcatgtgcttcctgaaaacatatcaatagccctggaaaggttaatctaattccacttagaagaattcagttacctctgcagactacagtcaattttttagactgggttctaggtttaattttatttaaaaagctcaggtcataatgcagttgttattgcttctttaacatcatacttagtaaacaataacatatcaggagttcagtttggggtatatactttttaaaactttaaacttatatggacttgctaatggacattgaattttcttctcggaagtcttccmtggtgagaaaacgtrgctattacagttggtttctgatgagtctataaagcaagtattcagtcn

SEQ ID NO: 193 - DNA, 570 bp, Homo sapiens
  SITE (528): n equals a,t,g, or c
  SITE (546): n equals a,t,g, or c
  SITE (564): n equals a,t,g, or c
  SITE (568): n equals a,t,g, or c
tgtctctcgctggtgctggcaaggagcttgggatctgtctcctctttcgcctcctgcaccttgagagccctgggtactctgtcacagcccctgttgccctgcgatctgtaggtccttggggacgcacagttaaggtgccagaacatcctggaagctgggaaatgaccatggctggagaaggaaagaaggtgtgttttgcctgactcagtgactatagagagaaccaagttctgcaggcctgtcacctaagtctcaggtgagtatgaattctcttgtgtttttcacagattgttgcagtggcaggaccaaggtcaaatgagttatagccaagtctacagtaagatgtggcagtattctgttttgaagccgggaccatgattgggcaagcttgccacttggtcaagtgctcaccctctgaaaatgtcttccttggtctttgcctccagctgggtgccacaaactctgaactggattccaaggstttcatgaatgcacttatgkttgctgtkgcagctgcattatgtcstngggggatgtggatgcagnccctgacattctggtcgngttngc

SEQ ID NO: 194 - DNA, 503 bp, Homo sapiens
  SITE (52): n equals a,t,g, or c
  SITE (159): n equals a,t,g, or c
cctgacgtggtgagtgctccagtggcattaagaacatagggcatgtctgtcnggtaacctatctccccagcagactgagctccacgagagcagagaccctggtgcagggcctggctcacagtgggtgctcaattaatattacttatgtgaaggaaccanttccagctgctcaagtattctatgctaaaacttgggtttctttcatccttgttgtcctcccaagatacaatgtgtacataattggaaagttagccaaggtgactatgaaggtgaccccacccaatcaatctatgtcttcctggttactgtgcctgtcattcgatgattccacggttatgtctatagtgataacagaaaaaagcaactgaaaacaatattatttactcgggtctcgtgcatctcctccacacatttgtagaaatgagattaccacaaattgccaagatggttacatcaaattttcagcagcatcagtcataggacaaaaaggcctttgagtgtat

SEQ ID NO: 195 - DNA, 246 bp, Homo sapiens
aagatttgagggtgaaacaaagaaaaccccctaagtgagggaatcttttaatatttgtggctttagaggaaagaactaaaggagccatctctctcccctctcctccgttccgagaggaggggtgggtctcaracgtttttcctatggacttatttcttccatgtccaggactttgcacaactttggttttaaaagctgttgaaaaataggaaaacaaagggcattgttcacagatagggccagtct

SEQ ID NO: 196 - DNA, 294 bp, Homo sapiens
  SITE (268): n equals a,t,g, or c
ttcgatcccaaagataatagggctgaggcamggagaccgttgcagtccccctggccaccttctgggtcatccagggacctcctcatggcagtttgcctctctgggtccaagggcaagctgtaagtggtctctgaggtcctggagccacagcttgggaaggtgttgatgggcagggtggattctgagggcttcctctggagaggaagcatgtgatgagargtgtagacagggtcaggctkggacagaaggaaggaaaggggcagagctngggggaaggggaggaagcgatcatat

SEQ ID NO: 197 - DNA, 670 bp, Homo sapiens
ctttcaaccttcagatgaaagaagcaggtctagagaagtgttgcttccttcactctgatccaaatggggagtcaaccaggcaccagggctcaatcaacagcaataaacatcactgtctgaggtcaactggcttgctcagctctctgttatcaggcatgccaccagcagcacttctatcagagtgcgagctcctcaaggttaaaggcatttgagaaggcttaccaagagtccagacactagacaaagttacttgtgcagtctgctttcagacactgggaatgaagtcttcctccctaccaccaaacttggggggaaaaaacaaaaaaaaacctctaatccaatccttggtctgcaggtaagctaaagtgcagattcctgaggaggatcacagaaacttcagtactctggtcaacctttcagtgtgaatgagttccagccctattcttgaaaattgttattggaacagagcaggtaggccctgaggcatattgaagggagttaatgattatggagtgatgcagggtgcctgacagcattggacaggagggtatgttttctcatgttggtctcacaataactatgtagagccactcttacccccattgtacagatgaggaaactgttgccttaaaatacaatttttttgtaataaagtcatgctaatttgttt

SEQ ID NO: 198 - DNA, 513 bp, Homo sapiens
  SITE (348): n equals a,t,g, or c
ggcacgaggtcgctggcttagcagtcaagaccctccacagtctggtcccccaggactttcccaaactgatttccttccatcacggcaggcatgggctcgggaagatcaagtcactaaacccaagaccacacagataccaagtggcagatcatacagccaagccttcagaccctgacatctgactccaagaccattctgagcccatcacttcctcactttgatggtgcaatggactgtgtgtttgtgtccctctaaaatatacatgttsaaacactaatcctgatgtgatggtatatggagatggaactttggggaggtaattaggtcatgagagtgggaccctttatncaatgggattagtgcccttacaaaaaggggccagagacctagctagttctcttctggccatgtgaggatacaatgagaagtagacattggtgatatggtttgggctgtgtcccaatccaagtcttctttttgaatttgttagtttcccacattccccacgtgtgg

SEQ ID NO: 199 - DNA, 379 bp, Homo sapiens
  SITE (330): n equals a,t,g, or c
  SITE (361): n equals a,t,g, or c
aattcatgaaattaaacagatattattgcctttgggaaacatgtttttattgtcatttaaatcacatattaagaaaataatattgctataatttttagtccctcctttgagttctttctagctaagcactttcaatgtgtaaaatatctatccttcttacagagagacaagtatacaaatagttaaaagttaggattaacaatgccatattaatggtggaaaaagccctacccttcttttaacagggtattttatacctgttgttttgatattcatttattaatgtattaaatatgccatataattttctggatcttagtttacttttcngtaaaattttacttctacaattatttggggntttatatccatttttggt

SEQ ID NO: 200 - DNA, 504 bp, Homo sapiens
tattatttgccagtcactgtgctaatgattacctgggcaattaaaaaaatttaagcatgatctttaccaaaaaaacctacaaaacttgagtgttagctgtgtatgtaactaaagtttgttacttaaagtacagtgtagtgtcatagatacaaaataagcaagataggccattaatagttccaaatttcttgagaatagggattgtgcatgttttatctttccatggaataaaaagtaagtattgtttttaaaataataccaccattaaatgtgttgttaataacattggggttttgccattaagagtaattgagagtaatggcaaaaaccgcaattacttttgtacccaatgtattaatgattatcttcttccttcttgatttagtattattgtgaaggggtagcatggaaaagaagtagcaataagcaaaaaaaggaaattcacctaaacatttctgtgtacctaggtaaccctaacttaaaaataccttttccatacaaatg

SEQ ID NO: 201 - DNA, 590 bp, Homo sapiens
gttatatgggaatarggcacgtmactctcgragtrartkgytgagagcktgaatgtwtctcaaccattgcattgcwaatgraargtctagtaccactcakgcacagcagagtaawactgcatcggaatcccacctctgttgcgcagtggcattgccttcagkgwstcccatttgagatattttcccactgkgtgyacttagtactaagttccaaagtgcatacataatgggagaaggtggtacattatcactttttaaaataaagagcccaaagccttgrgaaggagctagacctacrggactwtcaagttctctaaagcaaatggtctccaatcatgggtctgccctatggaaamgacccagtgtcctaggccaaaccccctcccmymccgcaattagtcttaatcggtttaccacaatattactcaaggctctgtgggactaggtttgttttttcatctataaaagggagggggtaaaattaaatactttctagaactccttcagttccattggagttttatgttacaaacccctaaaactgtgtagagttgggtgactatgtgggtgtattcatctctgtgccgaat

SEQ ID NO: 202 - DNA, 468 bp, Homo sapiens
agctctagctggcaacaaagccaccactttccttgcccctctgcgtcctcagtttttatgatgtcattcttagcttttcttatcaagaggcagaatctgttttccccatcccatgaatctgaactggtcttgtggcttagtttggtcaatagaatgttgtgggagggatggtttaccagttttgagctaggcctcaggaggtctagggcatgtctactctctcttaggacagctgcccccaccctgcaaaaaagcctgggctagcctgctggaggatgagagcccacctggatcagttgtctcagctgatttcagacacgtgagagagagctcagcgagactcagcttgtagctgactacagatgtgtgagggaacctggctgagaccaaaacaactgtccagctgagcccaggctaaactgccaacatgcagaattgtgagctaaataaaggctgctgttctaagtc

SEQ ID NO: 203 - DNA, 58 bp, Homo sapiens
aaactggtattttcaaacaataggaaacttttttttttttttttttttaaaatttaag

SEQ ID NO: 204 - DNA, 163 bp, Homo sapiens
  SITE (162): n equals a,t,g, or c
ggcacgaggacactggcatctttgaaaaccaataactgcacgatattacattgtttatctttctgatgtggcaaagatawctgttaaatgcgtagagaaataaattatgtaagttgatgaattgattaaatcagagaactaggtacttttttttttttaacna

SEQ ID NO: 205 - DNA, 558 bp, Homo sapiens
  SITE (490): n equals a,t,g, or c
cgttgttattttcttcttttaactgccttaatttctctttcagaatttcaagttcacttttatatagaccacacctttcttgtagccttttattttctttttcacagttagttagatttctctctaatatttcttcttcagcttgaacctaaaacaataatttaagtggacatactaatgtggttgtaagttttaggtgtttcaagctaaaaatgtcagtagtgmtttcagaaataagcaggagagtagactaagaatttcatacatttaagtccccagccttgtagtgaaaagaagcaaagtgaagttcctgggcagtagcaaaggacagagaaaaagacactactacctgtccagaaaacctgtaacagataggcaattgcattaacttgaggtcaaaaattcatctacagctgctgcgtccgagttactaaaggttaatttcagtgcaaatattccagagaagttacttttgaaatttgaaccacanaatttaccaacgaaaccacagcccaaaatgtagaacagaaaaaagcacccaagatacactgttgagag

SEQ ID NO: 206 - DNA, 414 bp, Homo sapiens
  SITE (316): n equals a,t,g, or c
  SITE (378): n equals a,t,g, or c
  SITE (398): n equals a,t,g, or c
cgtcgacaaaagacatgsacatttaaaaatgtgctaactatactagctaaaacctgtgcttaatatatgccagaaactgctctggtgctgttaatggagcctgctaaacaaaactgcttctcaacaatagaagtwgtactacgctatggagtggacactccatagcaatgaaatgttttggagtgccwktttcctcatctcagcaacataatagttctcaaacttcttggtctttgttattctgatatagataaaatgttttctattatgagtttcattttttttttatgtttaacagccatttgtgggggctgantgcatggctcatgcctgtagtcccggcactttgggaagccggggcgggcggatcacttggangtcagggattccaaaaccanctgggccaacatggtg

SEQ ID NO: 207 - DNA, 909 bp, Homo sapiens
taacatcatccattggggtagaaaaggagagggtccgagggtggtgggagggatagaaatcacatccgccccaacttcccaaagagcagcatccctcccccgacccatagccatgttttaaagtcaccttccgaagagaagtgaaaggttcaaggacactsgcttgcaggcccgagggagcagccatcamaaactcacagaccagcacatcccttttgagacaccgccttctgcccaccactcacggacacatttctgcctagaaaacagcttcttactgctcttacatgtgatggcatatcttacactaaaagaatattattgggggaaaaactacaagtgctgtacatatgctgagaaactgcagagcataatactgccacccaaaaatctttttgaaaatcatttccagacaacctcttactttctgtgtagtttttaattgttaaaaaaaaaaagttttaaacagaagcacatgacatatgaaagcctgcaggactggtcgtttttttggcaattcttccacgtgggacttgtccacaagaatgaaagtagtggtttttaaagagttaagttacatatttattttctcacttaagttatttatgcaaaagtttttcttgtagagaatgacaatgttaatattgctttatgaattaacagtctgttcttccagagtccagagacattgttaataaagacaatgaatcatgaaaaaaaaaaaaaaaaaaaaaaaaaaacgtttttctatttaccttctatcagttttctctaccaattatgttttttcaatgctctataagaatgaatatggaaattatatttcttttttctgtaaaagagttgcaactactttattatatttagaaatccaataaacttcttattacatttaaaaaaaaaaaaaaa

SEQ ID NO: 208 - DNA, 940 bp, Homo sapiens
gtcagaggggtgaggacggtcgagaaatggggagaagacttgggcttgagacgacctgggcttttcatgtgtagctcactcagcagtatgaggatgactgacacaccagtgggtggtttccaagtgaggcaaatgccatttcccctctcccctcacaccttgcctggcttcttccatgaagtccttgctgcttttctgcctccccaaaggtgaggggaaggggctggttggggatctgggaaagccagttctctgttctctcctgctggtgatggactaggcctttwagaactagcaagatccctcacacagctgggagaacacacacctttcttactccagacccattggtgtgtctccagtaacaaaattattggactcagcctccatatttgacagcaaaagtggccagagggagttgaaatatcttgaagaaaaggaattttcactaagatatgtcctctccctctcccagagtttagctgtttattccttttttttgtttatattgttctcatctgcataaaaccagtctcttgcaataagcctgccgcagaatcaaagtctgtacttcaaaaggtaactgcaccaagggatgggacagtgtgcatcaccctgatctaatcattgtgacgttggtagcttcctaaatactgtatgtaccttgaacaagggttttatttttgttttgttctgttttgctttttgtttttattggtaggctaaggtaattaaattttttaatttgctgttactttggttgtattttctgtactataactgcctacagtatgtcttttgcataaaatgcataagggtttggggatgtaaatggaattttattcatattttgtccaaatacctcttgtaatttgtatcaaaattcttgtacaatttttatattaaagatttatcagtcactgaaaaaaaaaaaaaaaaa

SEQ ID NO: 209 - DNA, 181 bp, Homo sapiens
  SITE (66): n equals a,t,g, or c
aatcttcaaggtgtttagcagtgatggccatctcatttatatttttgaaggatcattctggttgtnggggggaaaattggctgtttgggggcaagarcagaagcagagactagttaaaaggctattagaagtcgaggggagagaggtcatgacatcttggactcaggtgagacaggtagac

SEQ ID NO: 210 - DNA, 694 bp, Homo sapiens
  SITE (593): n equals a,t,g, or c
  SITE (687): n equals a,t,g, or c
  SITE (689): n equals a,t,g, or c
agcttatggttaatagggcattatctttgcattagatggccatcaaaacttatttattgggttatagatgaagagaacgaatggacttatttcgatccaaggactggaagaaatggacatattgttgatttcttgtaaaatgcactgaatgtctacctcagaactttagcagatgcctgcttctgctaatttaaggaactgatgctatttgtctttttaattttacataggaaatttaattttgatttgaagcttttaatgccctatggtaaatatgaaaatgtgtgatagagcaaattatttttcatctcttgcatttcttcgtgtatctcacactcaggggaatttttatgtagcataacgatttcataagtgttaacatttaagaaaattttcacattataaatatgagcagaagcctgctttagaaattggaaaccaagtttggccaaaatgaaaggcaaagtcatggctatgttaaaactcacatcttggggagttctgggtggtatactgacagtggaatagactcagatacagtgcttttagtattgattagtaattcttgaccaacggatcttggaactcaaganggccatggaattacttccaggccactgttaactttctgtgcatctacatttcctatacacgaaaaaaaaaaaaaaaaacccggggggggcccgnanccatt

SEQ ID NO: 211 - DNA, 535 bp, Homo sapiens
  SITE (6): n equals a,t,g, or c
  SITE (15): n equals a,t,g, or c
  SITE (510): n equals a,t,g, or c
aattgnaaaagcaanacctttgggccagtaaaccagactgtcctttaaggtgaacttttaagcaaattgtcctaggaaaaattgttaggtttcccagcccctgtgaataatgcggaagcactgcgcctaggtggtattccaaggcaggcctgtagtgaatgctgttggacccagccaccacccctgagcaatcatatgcagaccgctggcttcttaactgcagacacctacagactcagcctaagactttcccacgaggcaggctcgaagtgctggagctttaacacctctggagtggccctccaattacagctttgagaaacccagaatcctgttcactggaaggtykccgggtggsgctgacagcctcaaagtcgcaattgagtctgcgcaccggccattcaggatgggacgaccttataccgcggtgaggcggcgtggcaggacgaccaatttcagattcagggcgcggatgcagcataaatgggaaggcacggtttgagaaacggntctttctggcaaaggtaatggcata

SEQ ID NO: 212 - DNA, 812 bp, Homo sapiens
  SITE (594): n equals a,t,g, or c
  SITE (613): n equals a,t,g, or c
  SITE (672): n equals a,t,g, or c
  SITE (752): n equals a,t,g, or c
cacaacttcacttctctggatgtcgtctttgttatgcggaaaccagctttcctcatgctgctgctgttcccctccctttgtgtttgcccaaagtatgcatgcaaaccagacccttaatttcccagaggaaaacagctataagcaaactattaggagaaggttattgaaaatttgcagataacaaatggagttacaatgcaggaaacaacatcaatgacaacaatgtaatgtaacatgggcaccaaaaccagacactatgctcccctaacacacaggccacttccctagaagtttctcttttcattcattagctttagccagtcgccatgctccaggggtcagcctaccttccttttctctgaaattgccctgtagcacatgtcctctgtttggaagctaaatgatcacagctctgagattcctggagaaattgaaactccaatttttttataaaaagactataagcttcagagatgcaattctgtccataatgatgaaaatatttaaccttataacacagatactatagccgtataatccctggaatctgtccatctcagcataaaatccttgctttatctctgcatggagatnacaacttcaaccaaggggncactaccaggcctcagagacgaattccagtctcctatttagaaagaaaataactactcntaattttagaaattgcaacctcttacaaatggattttggccatcccaactatccttccttaaacattttaataagccacngagaaattaatataacttgttagaatgtttgctgtttgaatattaatgttagagttcagg

SEQ ID NO: 213 - DNA, 365 bp, Homo sapiens
ccttggtgagggtcccagcactgcgggcagccaagagctctggcagtgtgcgrtcccagacacccaagaggcctccccacaggcgggtggcacgccaccacccggattcctagggtcttccacctccgaccacagcccttgtctgccgtccagcaaggagcaggccctgctggtgttcccgggttccccgrttgtgcgccccaccccaggcccctttcccatggctgcctgtcccgcggctcagggcagccctccatgtacagtgctgcctgcacagagcctgtggattgcaggccccaaggcgttggggagagtccggggtcactgcagacccgagccccctttctttcatggagtcaggcctg

SEQ ID NO: 214 - DNA, 508 bp, Homo sapiens
  SITE (14): n equals a,t,g, or c
  SITE (25): n equals a,t,g, or c
  SITE (63): n equals a,t,g, or c
  SITE (81): n equals a,t,g, or c
  SITE (133): n equals a,t,g, or c
gaatccagatacgngcctatggggntttatattccctcataaaccagattttatggtatcttnggtaaatccataaacttntcttatatttttctgatagattttaagctaaaattatagttcaatttcaaangaaggataatttaggtgttatgaacttcacaacatctaatcaggagatctacatctttatttgtaatgttttagaaaacatatatctgattattcccaatatatatgtgagttgatgatgtgtttgtaaacctctgaaattgtttttcaatattatattcatgtctatttcaggaagacttcttagatctaacagtagcagtcaaaaatgtatccggtttggaagatgctctctggaacatgtatgtagaagaggaagtttttgattgtgacaacttgtaccactgtggaacttgtgacaggctggttaaagcagcaaaggtaaagacagataactgctttttcccagggtccccactttgtagttagtacaagt

SEQ ID NO: 215 - DNA, 465 bp, Homo sapiens
  SITE (75): n equals a,t,g, or c
  SITE (186): n equals a,t,g, or c
  SITE (437): n equals a,t,g, or c
  SITE (463): n equals a,t,g, or c
agctgttttctttttatcattttcttaaacaggctgcttgggtagacgttgacttgaaaggtccattcttttgtnatcttgctggttcccttaacaagacaacaccttggctagcaagataatatcttggttagcaagacaataaacttgggcatgtgctcaacagcaacctgtctaatacatttncatttaaaatcccctctgtactactcagaaatataagcaagttattatggtgcccagaaagggggcaaaggttccagggtcctaggagatgacaaggatttatcctcttcatctttctccgatcccagttagcaggaatactttagcctggaaggtggagtgtgcccctaaccaacctttacagatgggtgactgtttgggagcttatggctcactccttctcttttaaagcaggtgcattctgggcaagntgcagcagcaaacctacccttttagnca

SEQ ID NO: 216 - DNA, 239 bp, Homo sapiens
  SITE (55): n equals a,t,g, or c
ggcagagcccaggaccagccgcagccaccccagcacacgtggtgacagccaagcnactcgtaaggagccctgcaccgaggtcaggaccagaggccagagcgccgaggccgtgcaccaaatccaggaaataacagccggggtcagtgaggwgcagcacagccatggcctggacgacatgcagctgcaccagctggccctgcacccagcgcccacctcactcagccataccttccaccgcg

SEQ ID NO: 217 - DNA, 141 bp, Homo sapiens
ttcctgcagctggcggaggaaacaaaggttcagtaaattgcctagggtcacacagggaattggtggaagagccaagtctaatgcccagatttccaaactgggagtcttaacccttcatcagtgctacctgtgccacatggg

SEQ ID NO: 218 - DNA, 340 bp, Homo sapiens
agatggagtttcactcttgttgcccaggctggagtgcaatggcacaatctcggctcactgcaacctccgccccctgggtttaagcaattctcctgcctcagcttcccgagtagctgggattacaggcatgcgccaacatgtctggctaatttttgtatttttagtagaaatggggtttcgccacgttggccaggctggtcttggaactcctggacctcaggtggatccacccacctcgggcctcccaaagtgttgggatttacaggcgtgaccacccgcacccggcccttgtgtacattttataaagagaatttttttagctaaggagtttcagaatttt

SEQ ID NO: 219 - DNA, 402 bp, Homo sapiens
  SITE (52): n equals a,t,g, or c
  SITE (193): n equals a,t,g, or c
ggcacgagccttgcccgaaagctccttcccacacataggagctgtgttcctnaggactccactgagatatatcacgtcctccaagactccgcttaaccttgaattaggggtctcttctttctattcttataaccaccacccccacatgtgcttttaatggccataaaaactgtacacactactttcttatttncttacatcctctcctactcgccattaactcctttagaacagggactgactgcttcctttcctagacatattcccagggctgagtgttgtctctgggcacacagtaggtgctttataaaatattgttggaagtaaagaagaaacacaggaaagggtagcaggggatagtgcccagcacttgactcaaggacagaaagcagttagtttctt

SEQ ID NO: 220 - DNA, 322 bp, Homo sapiens
  SITE (296): n equals a,t,g, or c
  SITE (313): n equals a,t,g, or c
ccacccatatgtggtcatgttcacttaattacatcttgaaagagcctatcttcaaatacagtcacattctgaggtccttagggttaggacttcaacatgaaattttgggacaacacaattcatcccctgtaagacctcaccctcaggaccttcaaaattcatgtytttcccacatgcacaatccattcacctcatcccaacagcccccaaattctcaacctgtttcagcatcaactgtagtcccaaaatctcatctaaaatatcaacatctcaatcaggtatgggttagacttgangtatgattaatccctgnggcaaaacc

SEQ ID NO: 221 - DNA, 617 bp, Homo sapiens
  SITE (245): n equals a,t,g, or c
  SITE (317): n equals a,t,g, or c
ggcagagctggtatggaactcatggtctcaaataatcctcctgtctcagcttcccaaagtgccaggtttacagatgtgaaactgagccagatagcacttgtttacacttcaatgcccataagaccatattacattttatgaactacatacatgtgcgtaagattctagtaaacaaggatggkaaaacatcaacaccgacttcagagaatkaacaacttcctctgggaaggaaaaaggggccaggnaaaagatacaaaggtggccttaattataactataaaaccacctttttcttttgtttttgagactatcataanatagcataaaaccttctttttaaagaagtaaaaaaatcctgaagcaaatgtgtcaaaagttcaacatataccaaacctaggtgatggatacttggatgttatcaaacaggcttataaatatatatgttaatccatatatatttcatgtgtaaaattttcattaaaagaaagtgtatgtctagaagggttccatggtagcacaacagaaaaatggaaacatcttaaatattcaccaactagaggagtggttaaataaatccattcaagggtgtattctacttttagaaatatctcaatata

SEQ ID NO: 222 - DNA, 356 bp, Homo sapiens
  SITE (296): n equals a,t,g, or c
  SITE (345): n equals a,t,g, or c
gaattcggcacgagaggagaacgtactctgaacctggtatagactaatccatcagtcatttggtcatctgcaacagggaagaccagtttggaggggaggaagtaaataaggttggatagatgtgtagctggagtgattattagtcatgtggtccattgtgaccaataaagggtaactccaagaaatactatgaaatgtttagatttgatatttaaaatagttgtgtgaagtaggaaattgagtatccagatgggaaacaatctgccagagtgagatgtgtgggacctaactaaggngaactttgggagagggtagctggaaatggccttcctttcattccgcggnccattattccc

SEQ ID NO: 223 - DNA, 439 bp, Homo sapiens
  SITE (48): n equals a,t,g, or c
  SITE (292): n equals a,t,g, or c
  SITE (429): n equals a,t,g, or c
tgtcttatgctagagttggtagaagaatacagactgacagtgaaaganagctactgcatttttgaatctggaacctgaccgatgctatcaagtgtgggtgatggctgtgaacttcactggatgtagcctgcccagtgaaagggccatctttaggacaggtaaggagatggatgctaagggtgcattagaagacaacgctcagttcttcacagactcttgagatcagccagtaagtgtttattaagcacctattgtgtgttgagtgttgtgcaaagtgctggttatacaacgntgacttaagcctggggtcctgttctcargaagctcatgctcaggtggggagatggaaaaacagaggatcatagaaaatgtgtggtaagggccatatccagatatacacaggttattatgagaacactccagaggggncacccaagtt

SEQ ID NO: 224 - DNA, 252 bp, Homo sapiens
  SITE (210): n equals a,t,g, or c
agagacacatctaagtacctttagggcttctrataggttatgccctatgtaaatraaggattctsccctaggccaatcagaggcaggattctgtccaggaccagtcagaatcaagattctgcccaggaaccaatcagaggcatctcacctatggcatatatgcagatgaaggtcccagaatggaccaaaaccagacattcccattcctgncataggggaggggaggttcggagagggatgggcctttggctg

SEQ ID NO: 225 - DNA, 271 bp, Homo sapiens
  SITE (150): n equals a,t,g, or c
aattcggcagagcttccttctactttgtcttctgtagagaaaaatactgataagtgacatttattataggttatgtaaaataatatatatgtgaaattccttaagatcttaagactgagctaatttttttttattaattatgctactgtngcttcagggaactaagcagtaagctgaaaccaattctgtgatgtttgtcatttatattatctggagagttgttacctacattgcagtttatcctgatttcaatttgacaatgtgtacatgt

SEQ ID NO: 226 - DNA, 643 bp, Homo sapiens
gaattcggccacgagtaacagttgagtggtgctccaccctcatcccagcctccttactgccattaccaggagaggatgactcaacacattcatgttgtgagatacttaaccaaatttatgccagatgggaagacttaaaggatcagcccttggacaatctggtcaaaatatggttttcagatgggagcagttttgttcagaatgaaactatatatgcagggtacacagaggctaaagctctatccttggggacctcaggacaactagcaaaactcatcttttaaccacaggcctaacactaggggaagggaaaagawtaacctttatacagattccaatatgcctttttggtgcttcatgcccaagccaytwtctggaaggaaaggagtacccagcaacttgggatactcctactaagtaggggccccaaatcttagagctactagrggccattcacttgacccaggagttggcagtagagagggttctggaaatggcaggcactcattgggtaatggtcaagctatcataaaactgtccctctgaaatgagaagtggccatgactgggaccaagacagagaggagttctgcaacagatagaaaacatctggagccagcaaatcacaattccctgatcaggtt

SEQ ID NO: 227 - DNA, 781 bp, Homo sapiens
agttgctttgtctggtagctcaagagaaggcagagccccagcacctctgtgccccccagagctctgtgcagggagttggccagctgccgcatcatcggccaccaagggcacaagaggcggaggctccagtccctgctgggctgcctcagtcttcagtgctgattgtgtcacgggtcagcgtgcgctgctgagccctgtactgttaacagtgcaaagctagtgagtagctgtcaggttccctgggcctgccatcagggatcactaaatttaaggcttccagatccctggcaggaacagattccagtcctgcttactcagtacatttgctccaaacttttcaacttgagggcaatactaaacttaaaaataagagtttttttattacaaaattatttttatggtccctttaacgaggaccctatggcaaatgcacaattattcagaattacattttatcgttttcacattgaaaacagcaaatgttgacttagtaatttttatatcgatatctatatgtatatgtatatttaatcaaccagcagttttgaaactagtcatcctggtacaaaagttttgcagcattgcctaaattatagtgctcaacacaagaactgtttttggggccagtttagcatttgtgccgcctccttttgctactcaaaacagcaatgcttggcggcagccttccatgaggcagaaggggtcgtcgttctctgaaaacagtgactctgaaatgttgggacaggggaaggggtgggaaacatgaacatgctcaaataaa

SEQ ID NO: 228 - DNA, 212 bp, Homo sapiens
  SITE (8): n equals a,t,g, or c
tgaaaagncttggggaaacctagtgtttctcaggcttacttggccatggaacctattttctttgggaatatcttacaggacactactgtttgccaaacccaatttggggcaatgctggtttaggtttaggttaatctggatgttctgtaatgaaaccacattatagatagacacaggaaaattggctagtaggtcttgtgtcccctcggaat

SEQ ID NO: 229 - DNA, 182 bp, Homo sapiens
  SITE (40): n equals a,t,g, or c
tcatgcctgcccacattgtgaaactatgtcaaatctttgncccccgcgaggcaacttctactctactaccgcaatctgatctgctttttactattattgaagaggcttacgtggtattgcttggaacagactcttctaggaagctttgcatcccttgggccttctcctatcaacccctcttt

SEQ ID NO: 230 - DNA, 406 bp, Homo sapiens
  SITE (350): n equals a,t,g, or c
  SITE (379): n equals a,t,g, or c
  SITE (405): n equals a,t,g, or c
cgacctgtgaacaggttcctgtccccctctgttgccctttcccagctgctacggaagaggcacataggaaatgacatcgtgacgatcatcttccaggagcctggcgcgctaccgttcacccccaagaacatccgctcccacttccagcacgtcttcatcattgtccgagtccacaacccctgcactgataacgtctgttacagtatggctgtgacccgatccaaagacgctcctcctttcggcccccccatccccagtggaaccacattccgcaaatccgacgtcttcagaggacttcttgctggccaaggtgatttaacgcttgaggaacgccgcggaacaagttccgnacaagtttcacaccatgggccaccagggncccgtcgggggttattttcaagggant

SEQ ID NO: 231 - DNA, 316 bp, Homo sapiens
  SITE (249): n equals a,t,g, or c
  SITE (281): n equals a,t,g, or c
  SITE (286): n equals a,t,g, or c
atccacccacctcggcctcccgaagtgctgggattacaggcgtaacactgwagcccagccgattttcctttttaagatggaccccaagtgtagtgctaaagtgctatctagtgttcctaagcacaaaaatcaccttacagagaaaatatgtgttagataagctttgttcaggcatgagttacagtgttgttgggccatgagttcaatgttaatcaacaatatatattaaagtaaaacaaggcatctttnaaacagaaacacacattaaaacataattatgnattgntttggtttaacaaaaatgtggacaaggggg

SEQ ID NO: 232 - DNA, 321 bp, Homo sapiens
  SITE (286): n equals a,t,g, or c
  SITE (321): n equals a,t,g, or c
ggcacagatggaagtggagtttgcaatccgtgtttatcggagaattggaaatgttggcatagtgatgtccttggaacarataaagggaatagaggactacartcttttggcaggacaccttgccatgtttaccaasgattataacctggctcaggacttgtaccttggcatccagstgtcctattgctgccctgggagatgagaagggatttacagcattgggacagtgctctacaactggcaaagcatttgggccccagaccagataccttttatatccaaaagnattatgcttattccagcttggaattcgcgtaagtn

SEQ ID NO: 233 - DNA, 170 bp, Homo sapiens
atatgtggagaaaatccagccaaacccagatatatagttggaaaggggaggcatattttaatagcattttcagaaaattgtggatagtctttggataccacaccacaatttggatatatgaaagtttcttaaaagctagttgcaatgtgaaatctgaaatcatattaatg

SEQ ID NO: 234 - DNA, 215 bp, Homo sapiens
  SITE (208): n equals a,t,g, or c
  SITE (214): n equals a,t,g, or c
atgcttctcccagtcctggtcagtgtggagcagcttccctccctctatgcttatctcttcctccacccctaaactgaagatcatcacctaggatagcgcakaggggcaggagccctggctcaaggctgagttctgcctcttttattattattattattattgcttttatttatttatttacttatttacttaatttttttttttttgngatggng

SEQ ID NO: 235 - DNA, 555 bp, Homo sapiens
  SITE (507): n equals a,t,g, or c
  SITE (520): n equals a,t,g, or c
  SITE (528): n equals a,t,g, or c
  SITE (539): n equals a,t,g, or c
tacgagtttttttttttttttttttgagatataaaaatctgtatttatattacaatgacataaggacacagcacggcccacacggtggacactttgatttgggtaaatccttacgagtggaatgaccaggtgaaggggcaggaatattttttgtcttttgaaaacctgccgcccaactgccctgccacagctgatgcctacacacgtgactttccccacgtggtgccaacactgagcaccccagccttggcatgtctgctcctgccgttcccaagcccagcaaatcttgtccccctgggagtaacgtcggcagggacagccatttcctctggacagaggaggagcctgaagaaggagggggctgctgggtgcagcggtaacagccccaccagtcgggaggtctgcctggaggtggcctgaacagggccaagatcctcaacgtctcccacgctgtctcccatgcacaggtgcagggaaaggggtcccaggctgccgctctgtgactancccagtgcctggnagtcagcntccccaaccgncaaacaggagtgagcg

SEQ ID NO: 236 - DNA, 589 bp, Homo sapiens
  SITE (469): n equals a,t,g, or c
  SITE (539): n equals a,t,g, or c
  SITE (549): n equals a,t,g, or c
  SITE (564): n equals a,t,g, or c
  SITE (575): n equals a,t,g, or c
aacaggtcaaaagaattgtgaataaagaagaaaacattgatataacacttggctcaactctaatgaatatattttctaatatcttaagcagttcagacagtgacttgcttgagtcatcttctgaagctttaaaaacaattgatgaattggccttcaagatagacctaaatagcacatcacatgtgaatattacaactcggaacttggctctcagcgtatcatccctgttaccagggacaaatgcaatttcaaattttagcattggtcttccaagcaataatgaatcgtatttccaggtaatgagccagtggtttctttcattttaattaattagttagacatataaaaacttgctgatcacttagcagttgctgcttccaagaggtcttgggtccatgaagtgggcaaggtctggaatgttggcttaagtttaactaggaggcagtagcccattaaagtattgtggggngcttcaggagtggggtattgctttcataatctggggtgacaggggttggtcagctttaccttctacaagnggggttactnggagcttaagcatgngtaggggcccnccatacttggggtt

SEQ ID NO: 237 - DNA, 492 bp, Homo sapiens
  SITE (10): n equals a,t,g, or c
ctgccatttngtgtgaaaataagaaattttcctgtgtccacttggtgaagtgtgtttttatttcagggactgtttacattcaaggatgtggccatagaattctctcaagaggagtgggagtgcctggaccctgcccagagggcyttgtacagggacgtgatgttggagaactacaggaacctgctttctctcgatgaggataacatccctccagaagatggtaaccacccttgtacatctttacatttttccttatatttctgttggatttacaagcaagggattatcaccaaaggaaaataataaagaggaattataccatctggtgatattagaaagaaaggaaagccatggcatcaacaattttgacctcaaggaagtctgggaaaatatgcctaagtttgacagcctgtgggactatgatgtaaacaattacaaaggaatgcctttgacctgtaacaaaaatctcactcacagaaaagatcaacaaca

SEQ ID NO: 238 - DNA, 420 bp, Homo sapiens
  SITE (417): n equals a,t,g, or c
tgggctactttatttggccttatggcatataagaagcataaatgtattggccattactctaatggcctataacttgtcaggatatgtttaagctttgataaagtttgtttttctttagttctccaagggacttagttggattttgtctttaatcttgcagcatccacaaatccagaagaaatctcaatatatcaaatacctttgttgtgatgatgtgaggacactgcatcagtgggtcaatgggatccgcattgcaaaggcatgtctccttttgatttgatgatggaataatgaggtgtttgtcgatgatatagttttcgttttcatgacaactattctgactatttcatgttcatgggatttgccagtgcctacgtttttcagggcctaagttttcaagtttttaaatgtttgtcnttt

SEQ ID NO: 239 - DNA, 605 bp, Homo sapiens
  SITE (534): n equals a,t,g, or c
  SITE (541): n equals a,t,g, or c
  SITE (592): n equals a,t,g, or c
taattgtggccttcacagagaagatgtttcattcatgaactcaggagctgaaggggtcttccctaaattcaggacaacattgagaacaaggccatgggggactgagccttggagtagaacagtgacatctgcacataagggatattgttaaggcccatgtggagaaaataaagctggcttcaagtgtctcaaggtacaagacatattttaatagagaaatgggcagtgacattttgtaatgtttagtatctcctgtgttccttcctgtccctttattgagrataaggaattttyccattcagttttgcagtttataggctctcactcagggwtaatatgaaagcatacactcttgccagaaatttttaggtgtggacttggagactctgggtctgaaccaggtgacagcagtttacatcagacttgggacaaagaacacctgggcatttgttctgtcacagatatattacatgcatatatgctgggagttccacactgagggccatctgaaagttttcaaccgatggatgggtnggttccnaactgcttaaatccatggaaaatcttttgacatagggccattctaccctgnatttattccgggg

SEQ ID NO: 240 - DNA, 576 bp, Homo sapiens
  SITE (57): n equals a,t,g, or c
ggaagatgggatatgtgggagagcaccttgtaaatgcctggtcattcctcatctgtnacaccccattactgccactccctgagtacgaattgccctctgttttttgggaatgagttagtgccactccmccactagaycctcagcttcccaaggactggagtcatgacatctgtgtctcctctccctctagttcagaaacagagctagaaacagagaaagccagcgataaataactattcacatttcctgtgggccaggcgtgatgccaagctccctaaatgggtttcttctttcatctctgcaatagccaagtattattgtccccattttaaagataagacactgaggctcaggggttcctggaggtggcctggcctcaggtcctaggacggggaggtgctggcttggctaagaggtcaggaagcttcccagcagggagggggaatgcagcagtgtgcagcgctatggtccttgaggatctggtgagactccttccctcagcagtcagattccagaggtgacaaatgggaaagggttttcttctttccagtcattgccttcagctagacttggctg

SEQ ID NO: 241 - DNA, 412 bp, Homo sapiens
atttttaattatgaataaactagattcatcttcatcatagtaatatggcaatggatactggactcttgaaccaggagtaaaaaaatgaaaaaaaaaaccccttcaaatataggaatagaaatactagagatagtaaaaaagagctatctgaatttgagaaatgtatgttttaaatatatctaccaaagaacagtattttcagcattgttttgggggaaataccataagatgtaaagaggtacccacttggtgtaacagctatgaggtctgctgagtgtgaagctcccctcctttgcctgcatgggrattgagacatctcacggtttctggggcacaggatctgcaggtcataagggcaagttttgaggaaaatacccatttttgagttgaatttttactaaaaagttagcat

SEQ ID NO: 242 - DNA, 994 bp, Homo sapiens
aagggagggctcgaagcttctcccggggtcgtcgcaagaaaaaatgcaagatttgcaagcttcgatcctttttccgtaaactcaacaccaggctaatgtcccaacggatctgatggtggggagggagaaaactgtcctttagaggatcttccccactccggcttggcctgctgtttctcagggagaagcctgtcacatctccatctacagggagttggagggtgtagagtcccttggttgaacagggtagggagcctggataggagtgggtgggaataaaccagactgggatgcctstgtctcagtcctgcctcctcacggacttgctctgtgacctcaggtgacccacatgagcttttagcctcagtttcctcatctgtaaaatgagctctaatgactttgtgactctttggtgtggccctggagcctggggcacggtggagttcctggccggccttgccacttgacaactcctttaaggcttcccccttaacacgggatccctgtggtggtgtttgggagttgcctggaggcaactccaagcctggcccccagctgaagcatggcaatctggctgctctctacagggacccccaagcgctgtgggtggagggcaggggtcgggggggttgaccttcttgggtcttcacatgcctaggccagtcctccggtcagactggtgtcaggcaccgtggtgcaaaattcctcttctggcccctccagtacccagagaaactggctgggccattaactgctgcagcaccaagggtggtagaaagagctgtgaagagcccccaaaccagtaccaggacacctgggttctcctgtgacctggggcacagttcttgccctctaggccttgatttccccacctgcaagtggggatgccagccctgctctgcctccttcatgaggctctggaagactggccaaggttgtggaggagcttgtgaacttgattaaagtgtcgtaacatggaaaaaaaaaaaaaaaa

SEQ ID NO: 243 - DNA, 441 bp, Homo sapiens
  SITE (428): n equals a,t,g, or c
gggtaactaatcttttcatctttttcctgccatatgactcagtagtgacccctattcccatcactcagcccccccttcccacacccccactatgccccagtgcaaagaaatcagctttgttccttcactggaaaagatgcacgtttctctgactactgtagccatgctgaaactatctcccaggaacaactttttatctcattcatgtcaaaaaagaagagtcagctagaggggatctgtggcccaaaactcagagttttaaaccagagctcagaaagtatatccctgccaccagcttctacaaagacaaaaaggggaacaggggacttgaggggttcggtgatgggaaggaagctaggccactgatgagtatcttccttttccctttttcatctgtaaaaacataacctcatagggggagttacggnggtttgaaagcat

SEQ ID NO: 244 - DNA, 164 bp, Homo sapiens
aaacaaattgaaggtttgtggcaaccctgtgtcaggcaagtctatcggcaccatttttccaacagcatgtgttcacttcatgttctgtgtcacattttggtaatycttgtagtatttcaaactttttccttattattatatgtgttattgtgatctggctcgtg

SEQ ID NO: 245 - DNA, 253 bp, Homo sapiens
tccatagggagaagggcataatgaggcaagttcgaccccacattcccattatggcttgaactagtttttcaggttaactttggaatcccttggccaagagcaggagtccattcagttgggtggggggcttagaatttatttttcggtttataccgtgcttactgatgttggcccacgtgcattcattcattgccatgaccccacgttcctttccttctagcctgtgaccctagggctgctgtggtgggactgc

SEQ ID NO: 246 - DNA, 380 bp, Homo sapiens
ccgaactaragtggggcatacataaycttgctgctatgcttcgaagctgtagtctgaatcaacctaagttttaaacagaaggtgaacctctgagaaaatccagttcttagaggaaaagataaaagctaacagtaagatgtcagctgtggatttatcatatatggccattattatgttgaggtactttccttctgcacctaatttattgagagtttttatcacgaagggatgttgaatattatcaaatgattttyctgtcctttaaactcttgaaataatggttagaaatgtcatccttttttttttttgttctagagacagagcgagacctccccccaaaaaaaaataatwaaagraagraagaaaagttacccttaccc

SEQ ID NO: 247 - DNA, 332 bp, Homo sapiens
  SITE (44): n equals a,t,g, or c
  SITE (176): n equals a,t,g, or c
atcttttccttcctactgctccctgggccagccctaagattctnagcaagagagtattctggccctgtgcggtggctcatgcctgtaatcccagcactttgggagacaaaggcagaaggattgcttgagcccaggagttcaaaatcagccagggcaatatagtgacaccccatctntacaaaaaaatttaaaaatgagctggatgtgtgggcgagcacctgtagtctcagttacttgggaggctgggtgggaggattgcttgagcctgggagattgaagctgcagtgagctctgatcacaccactgcactccagcctgggaaacaaagccag

SEQ ID NO: 248 - DNA, 367 bp, Homo sapiens
  SITE (345): n equals a,t,g, or c
aaatcatgaatgggtattaaatgcttttttggcctctattgaagggatcatgtgattyctcttctttagcctactgatgtggtgaattgcattaatggatttaattgattttcaaatgtagaattgaccttgcatacctgggagaaatcctacttggtcacgatgtgtaattctttttgaacattgttggatttgatttgctaatattttgttgaggatttttgcatctgtgttcataaaagatattggtctgtagttttcctcgtgccgaattcctgcagcccgggggatccactagttctagagcggccgccaccgcggtggagctccagcttttgttccctntagtgagggtaaattcgagctt

SEQ ID NO: 249 - DNA, 207 bp, Homo sapiens
ttgcaatggattttggtccattgatcataatgacatgtgacatctatttcaacacttagtatgtggcaaacatggtgctttgtatgtattatcacttttactgcctacatcaacaacattatgatgtaggtggttctgttccctcagttttggagaacaggaaatggaggcacagaaagatgacataactagtctgaggatgtaggg

SEQ ID NO: 250 - DNA, 304 bp, Homo sapiens
cgtagaaaaaaaatacagagtttgaaaacatatcctttcagaggtcgtagatcagtcttctaaaataaaaacatcttacataggccaataaattaataaatgacagagctgtccaactttccagacttctccagtcttaaccataaattttccggatgcagcaatgtcttgggttttcagtgctgtcaaacttgtctactttcctcttgggaagagccattttaatccctgatccctgtcccacctaaatcaaggcagtgtgattgccaaaaacagcaaagtttctaaattagacaccgtatca

SEQ ID NO: 251 - DNA, 373 bp, Homo sapiens
  SITE (344): n equals a,t,g, or c
cagacttggccttaggaaaggtaagtaaagtggcaggattgggcaagttattacaccaggtgatggtaagatgaggatagaaagagaaccttatgggtcaggcgtggtggctcatgcttgtaatcccagcacttgggagggagaggcgggtggattacctgaggtcgtgagtttkagaccagcctgaccaacatggagaaaccccatctctactaacattacaaaattagctgggcatggtggtgcatgcctgtaatcccagctatttgggaggctgagggagaatctcttgaacccgggaggcggaggttgcagtkagccgagatggcgccattgcactccancctgggcaacaagaataaaactccatctc

SEQ ID NO: 252 - DNA, 567 bp, Homo sapiens
caaagcggtgaggtaaagagaatactgaatgaggctcgggatcctgagttttagtttttaggctgctacaaactagctctgcaatcttgagaaaaatcacttcagctctctgtaccttggtttcccatctgtagaaggaaagagcagaattccactccctcttgcttttacttgtgttgctttctctgctaagccagcaactccagttcccttcctttgcctatccccaccttattttcacctactgcaagctggaaaatgagatgcctcagtttgttagacctgggtggggtgtgatgcagaactggaggggttcctttctaattgctgtcctctggggttcttatccatttttgttawttaggggctttctttgctttctggctcaccactgagatggttgaaattgccacataaatgacccctggctcaagctagcacattgtccaccaggcatggtggctcacacctgtaatcccagcattttgggaggctgaggcaggcggatcgcttgagctcaggagtttgagccagcctgggcaacatggagagaccctgtctctactg

SEQ ID NO: 253 - DNA, 534 bp, Homo sapiens
agagagtgtctcactccgtcacctaggctggaatgcagtgacgcgatcttggctcactgcaacctccacctcctgggttcaagagattctcctgcctcccgagtagctgggattacaggtttgcaccaccatgcctggctaatttttgtatttttagtagagacggggtttcaccatgtggccaggctggtgtggaattcctgacctcagggtgatccgcctgcctcagcctcccaaaatgttgggattacaggcgtgagcacctgtgcccggccagaatctgcattttaacagaacccccaaagctcattccattttgagaagcacatctctaaatcacacgttagatttgagtgtttttaaatcaccgcaaatgaaagcaaaggattttagccagaaaataaagccatttgttggggtataagacaaacatgggccgtctatggaaataaaacattgatgtgatcctttactcttaaaatccagtttcatcaggaaggaaatgttttataatttcataagtactgacacttt

SEQ ID NO: 254 - DNA, 385 bp, Homo sapiens
  SITE (69): n equals a,t,g, or c
  SITE (297): n equals a,t,g, or c
ttaactggaataaggcaatgacaggaagaaaacccaaaccaggtggagctgtggctacaaactacagantgctcacctgcctaagggggacacagaagggagagtctgggaccgaagagcaagaattccatgtggacttggagttcctgaccattcagcagtcattcatttcagttaaaggtagacttcgctctcgtgaaaatgtgcgtgtgagtgagagtatatgaggaacctcaagaaagagagaaagataactttttaaaaattccctggaagatattggggtaggctaatttnaaaatcaataaaaagaagcagaaaagaaagccaggacaacgaaaactccacttattttacagtttcctctgagactggcaacacattt

SEQ ID NO: 255 - DNA, 170 bp, Homo sapiens
  SITE (107): n equals a,t,g, or c
agggccaccacttattatctagcagatcgtcgctatgacatgctgccttccgtcctcagtgcagatttgtgttcccttctgggaggcgttgataggtatgctgtaanatcaatgtgggaactggataaagcctcttatgaaattaagaaagtgtggtatggcagaaccat

SEQ ID NO: 256 - DNA, 204 bp, Homo sapiens
  SITE (5): n equals a,t,g, or c
aaatnctctttcgagatgggggtctcactttgctcactgttgcccaggctgagtgcagtagcacaagctcagctcactgcagccttgaccttcttgggctcaggtgatcctcccacctcagctgcccttggcctcccaactccccgctaccccaccagtagctgggactacagttgcatacatttcctctcccccagctcgtgc

SEQ ID NO: 257 - DNA, 171 bp, Homo sapiens
ggtggttactcaaaacaatttattaaaagccatttaaactgggtttctattgctttgagcaacaagtgtctaaacgaatatatagagacaaaaacaaacaatctacatgaagaaaatgggaggcaagtcacttcctcaaaggatggagaatatttgggcattctgaattgg

SEQ ID NO: 258 - DNA, 483 bp, Homo sapiens
aaagaatttatgagacattaaactacatggacaaaagtctcatttctgaagtggtaggctgtgagttttcactattctcctacataataattatgctccaaaacaatcactattcctgacttctctacttacctgtgtttttaccccctcttctctacctatctaaactgttcttagttctactcaaaactactcctatccaaaactatcattatgatcacaagtgaattctcccacctctgttaagttcagagctgtwatggtatatggaacattcaacgtttaataggggctggttggcaacctgtgtagtatttgacctcaggatgcttaatcctcatttgccaaatcaatcacgtttgttttcctcttcccccaataagactaagkcacttcttacaagtcatcccacattactgagcacagtggkccactaagraagctgttaaaagtgrtaaccaacaacaaaacactacatcattg

SEQ ID NO: 259 - DNA, 281 bp, Homo sapiens
gcaccatcagcgtctgaggcgtcccactggctctgatcttgcttcctgcttggaaactgaagtcgaattgggctcccctggaagggttcattcaggtctgttgactgagactggccggcctgtgggctgccgtgatggattctgtttgacgtattgttctctagaaggcctggctctgatccagtgacccctcctccctgactttagaggctggtgctgtgtcgggaggaaggtcagggctcctgagcagcaataaaggaccaggaagaggcctgaggtgt

SEQ ID NO: 260 - DNA, 408 bp, Homo sapiens
  SITE (241): n equals a,t,g, or c
  SITE (381): n equals a,t,g, or c
catattgtacatgtagaaatttgtggtgttcactttttatcagaactaaatccggattctggggctggaggacagataaagcagaagttgttaatggttacgaagcaaaggtaaaaggaaactcttaaaataagatttaatatagctatttagcttctatgcaaatgaggaatctgtycccatttttttcatgcatctgtgccatggagatgctctggggaatgagaactgtctaatgtgnctctcacttggatgtttgattttgtcttatttgactttcaggaaatgggatagcatgccctgaggaggtctgtagctatgctaaagagaaacaatatggtagagaaatgagtacaggtaccagttgttctggtaggaatnacaagctagtcattcccttaattattt

SEQ ID NO: 261 - DNA, 397 bp, Homo sapiens
  SITE (62): n equals a,t,g, or c
caaagctcgaatttacccctcactaaagggaacaaaaagctggagctccaccgcggtggcgnccgctctagaactagtggatcccccgggctgcaggaattcggcacgagtggcagtgaccaacctcaactcaaaaggtaagtatattttgtgttcctaagaatccagaaagttcaaaatttctattaagaagttgctgctggccaggcacaggggctaacacctataatcccatctctacaaaaaatacaaagaagccaggcatagtgacaggcacctatagtcccagctactggggaggctgaggcaggaggactgcttgatcccaggaggcagaggttgcagtgaaccaagattgtgccactgcactccaggcccagagcaagaccctgccttt

SEQ ID NO: 262 - DNA, 393 bp, Homo sapiens
aatttacagatggggtcttgttatgtttcccaagaggctcaagtgcagtggctattcacaggcatgatcatagcacactatagccttgaactcctggcctcaagtgatcttcccacatagctgagacaacaggtacatgccactgtgcccagcaggacatttttcttaatagaaaactactatcgtgaagaattatgtttatctcttaactatgtctactcaactagtttcaacatagtatgaaattaacagtatcacgaaaagcaatgttccatgttaatttccatgtcgaagcaatgttcttgacccaacattggataaatctcattcttgatgctagctatttcttgggtatggttgctttaatcaacctctgcaaaactccgatcttag

SEQ ID NO: 263 - DNA, 315 bp, Homo sapiens
  SITE (106): n equals a,t,g, or c
aagagacagggtctcttgctctgtcacccagcctatgatcgcaatggcgtgatcatagctcactgcagcctccaactcctgggttcaagtgatccttctgcctcanactcccaagtagctgggacttaaggtgtgtgccatcgtgtccagctacttattttattttttgtagagatggagtcttgctatgttgccctggctggtctcaaactcttagcctcaagtgatcgtcccaaatccttcctgagtatctgggactacaggcacacaccaccatacctggctaattttattttattttatttttttttgtag

SEQ ID NO: 264 - DNA, 888 bp, Homo sapiens
  SITE (432): n equals a,t,g, or c
  SITE (558): n equals a,t,g, or c
ctaaaatttgctggacaaaaattgtacctcacagttaacagtctgtttcactaacatttgtgcataaaacctatatatctgaaggaaaaaatgcctaaaagcaaagataatatgagggtagccatggggaaaacakaaattggcaccaaaatccttgaaaagtatcctaacccatgctgtttcacgtttacactttactcaatttacctttatcagaggggccagaaacaatcaattcaacttcattgaccctataatttacaaaggaatagcgtatgtattggctttggggtttctaagaaatagtaaaaggataaatagtgaattggtcacctaatcgggaaaggtggttccttggtaagatgataatttcaggtgtgaatgaccacagtgtattcctctgcccactccttcatgcctcatagcctcagnaaggtggccacttcaatagaaccctgcaaagtcagagggcctgagttcaagccctaacgcctttgtctctctgatttacccactctgacacaaggcaggcttctcacttctcagagtgtttcctcnattaggagtctgataataattcagatattacctcccaagggaaaagaggaaataatatatacaacaatgctttatatagtataccttgatatccctaaatcattatatttctggatgcttttcctgaagcaaatgtttggctggactaccaaagtcagtaatttcataggcttttctcaagtatttgtcgtaactactgtcgtctccattttacctaaaacattaattttcccatgagaatacaccagaggttctataattgtactgctagacttaatttctcaccctttcccccttagtctttgaataaaacaatttctatacatttaa

SEQ ID NO: 265 - DNA, 406 bp, Homo sapiens
caggatttggtcctgtcttcttcccctccccgaattggtaaagagaccaaaatgcttaaagatacatgggtgttataaaactgctttgtaacacaatgtattaccatgatagaaaatatggggctgggcatggtggctcatgcctttaatcccagcactttgggaggccgaggtgggtggatcacctgaggtcaggagtttgagaccagcctggtcaacattgtgaaaccccatctctactagaaatatttaaaaaattagccgggcatgatggcgggcgcctgtaatcccagttactcaggaggttgaggcaggagaattgcttgaacccaggagacggaggctgcagtgagctgacacagtgccactgcactccagcctgggcgacagtgtgagattgcatccc

SEQ ID NO: 266 - DNA, 260 bp, Homo sapiens
ggcacgagcctacccctctctgttgtctccatgatacttggtgatctctggataatgtctgtgtgtttctgcaggcaaaaacaacaacaacaaataagccacattgcagaatagagaatagatcctgtttctgttatggattgagaagggtattttatatcatcctgttaatgatacttaaccaaatgcttttaacatttctagttgattgtagatattcaacaaacattgcagtgttggggaatgaccaacttcccggg

SEQ ID NO: 267 - DNA, 366 bp, Homo sapiens
  SITE (12): n equals a,t,g, or c
ggaagaaaaccncatttggtcatggtawataattaatatattattgaaatctatttttgcaattttgtttgggaattttgtgtttatattcgcaagggatatcagtctgaagtttactttgttttgatactgttggtactttgttggttttagtatcaaggtaatactagtttgaggtaaagaattgggaagtgtttcctcttctcttttccagaagagattgtatagaattgatgttaatgatttcttaaacctctagcagaagtctctagtgaaaatacctgggtctagagatttctttttgaagaatttctacatttgaattcaagttctcaatagttatagaaatatttaaatgatctattt

SEQ ID NO: 268 - DNA, 614 bp, Homo sapiens
ccttaccaaaaatacaattatgctgcatgcatgtttggtctatttgatttccatttaacaatatattatgaaactttgtctgtgccccaaatatattatattagcctatcatcattaatgacccatatatacacatatattgcccacaatttatcaagtcaaccaaaataagcatggactggatgtgtatgtatgtttgtttaaaaataaagaatgttctccttcaactatgaataacttcagaagttagagtaatgctgctttgaaaataacactattttctactatgatagaacttatctttgaagaaaaactgaatccccattttcatgaatatcatacctttctgagaaactatgacacatacataattagttacgaatacagactctcagaatttgaatttcaattctcattacagtaagccttctgttattgtaactggaacatggttgaatattgaactggataagaagaaatagaagaacaaaaagaaacaggacactgtatatattcaataaataattgcttaagatatggtaatgtcataaattcaaaatgtttcaactaaagaattaatacctagatatgttctttatttagtgattaccaaa

SEQ ID NO: 269 - DNA, 560 bp, Homo sapiens
ccaagctcatgcccttctccaatcagctagaaatgggctccgagaagggtgcagtgaggcccacagccttcaagcctgtgctgccacggtcaggagccatcctgcactcctccccggagagtgccagccaccagctgcaccccgcccctccagacaagcccaaggagcaggagctgaagcctggcctgtgctctggggcgctgtcagactccggccggaactccatgtccagcctgcccacacacagcaccagcagcagctaccagctggacccgctggtcacacccgtgggacccacaagccgttttgggggctccgcccacaacatcacccagggcatcgtcctccaggacagcaacatgatgagcctgaaggctctgtccttctccgacggaggtagcaagctgggccactcgaacaaggcagacaagggcccctcgtgtgtccgctcccccatctccacggacgagtgcagcatccaggagctggagcagaagctgttggagagggagggcgccctccagaagctgcagcgcagctttgaggagaaggagcttgcc

SEQ ID NO: 270 - DNA, 650 bp, Homo sapiens
  SITE (7): n equals a,t,g, or c
  SITE (8): n equals a,t,g, or c
  SITE (13): n equals a,t,g, or c
  SITE (82): n equals a,t,g, or c
  SITE (640): n equals a,t,g, or c
  SITE (641): n equals a,t,g, or c
ctttctnnaaacnactcactatagggaaagctggtacgcctgcaggtaccggtccggaattcccgggtcgacccacgcgttngaagccacaccagaattcctgcaattcagtgaggcagctcttcaaaaccaagcagctggtgacgcacagggacagaggggcccaggggctgccggctgccaggaccaccgcattgcagaggtctcccttgcagcaagagatctgggagtccacaacggcacttaacctgccctctgccctggcaccccagggactcactgccaaagacgctcactttctgggagacacagaccccatccaggaaggggcacgagaccacgctgcaggaggccccttccaagaccgccaagcatctgtagcagcgcagaccctgagctgggagagagggcaagaaaacacacccctggtggagatttaagatgctaatgacacatgcgacgtatgagcaagcaggtgcagctactgcacgtgtgcacccagaggacccccccagaacatgcttcctagcaacacctctgcccacccgctgtgagtaatcatggaagactcccatggaggagcctacctggtgccagtctctgctgctcgcccttacaagcagccggccctgaatcctcnntttagggcg

SEQ ID NO: 271 - DNA, 397 bp, Homo sapiens
gtttttgtattttttttgtagagatggggtttcaccatgttgcccgggttggtctcgaactcctgggctcaagcgatctgactgccttggcctcccggggtgctgggattacaggtgtgagccactttgcctggcctaggcttaggttctttaactcattctaagttgcttttctgtcttgccttgaagtgactctgctcctggatagtgggttaaaccaaagagcctaatggcacagtatgcaaagggttagctggtggcccttccttgaggcaggcaaagagttaccattacaatctgtggatggaacacttgggcctgtgataagccacctacctgaagtcatactgctaagtgctgggagaggggttagaaattaggtctgctaatttctata

SEQ ID NO: 272 - DNA, 636 bp, Homo sapiens
  SITE (559): n equals a,t,g, or c
  SITE (624): n equals a,t,g, or c
  SITE (635): n equals a,t,g, or c
ggtccagtaattgcacttttgcatatacagccaagaggacctgttctgatccacacaaaaaaacaagtattaaggtatttattccattatggtttgcggtagtaagtagacaaattggactcacagatatctgtctcttcggaagtcagtgaactaacttgactggatccatagtgtggaatatgatacagcagttagaagcaacttactggacatatatacagaaataagggtatgtcytttaaatttagcataaagggaaaacaaaagctttagcacaatgccatttaattactttaaagcgtatgcatgcatacatacaaacmtattcaaggstwcgtgtcaaatacaagaagggtacccattaagaagagggtaatcggagtgggtttagggataaagaagaaaaatatacatgttattatatttaatacagcaagcctttgacatatatattcttatactcacatatgatattcttactactacataaataaatataggaagctgactccaaaattgtaagtaacttatattaaggttgcattatatattaagngcagagctagtattccagctcatatgtcctgactctaaagccatattatttcccttatggcattnttaaattggana

SEQ ID NO: 273 - DNA, 884 bp, Homo sapiens
  SITE (858): n equals a,t,g, or c
  SITE (876): n equals a,t,g, or c
  SITE (884): n equals a,t,g, or c
ctttttttttttttaaagagaacaagaaaagtacaacattgcttaagtcctacctcatctttatttttttacagatgaatgtacttatcttttctgcagggattgagcctgtgaagtgataatttctatctacctcataaatctttacatttccttctgcaacaggccctcttcccctcctcagtggagtytgcatttccctcttyccctgcgtggggcatgatatgcacaagcctggcatctgtatggctgggagggcactggatgtgtgtggtggggtgtattctgtagattgagccaaggaaacacaaaaaaaaactactaagtaaaaaaacaaaaaactataaaacatggaaaaaataggatttgaaatgcataattatagaatacctgtgttcttgagaatactgtttatatggggtttagattatgttgtgttgttttgatctttttggaaaatcttctctttttaaatgctgcaacagagaaatttcctctgttctctgtttatacctcagtgtgtttaacatcctcttctgcatcgtttcttgatcttaracgttgtggctgtggcttgctagccaagaaaagcagacccttcatattttagggtatataatctttgkttcttttaagggagggtgtgtgcatgtttgtttcaaagccatcttgcacccaagtagtaaagctgaaaatgacacactgcctyccaaagaacctctcctttcacactttggttcttaaaaaagtatatagatggwacttcaagattttkgataaacatattctcaaaarttatgctttctwatttkgctggtaggttatwaagggttaaatggaaggaaaaaaaaaaaaaangggggcccttttaaaganccaatttn

SEQ ID NO: 274 - DNA, 777 bp, Homo sapiens
  SITE (51): n equals a,t,g, or c
  SITE (114): n equals a,t,g, or c
  SITE (116): n equals a,t,g, or c
  SITE (703): n equals a,t,g, or c
  SITE (759): n equals a,t,g, or c
gctaatgctaatcttatcaagtgagaaaaaacccaaccagcatatgagttnttactgctttggaaagagttctctgatccttaaggagataattataatgaaaccatttatagntntatcatgctttacttccagaaaatgctttatactggtgacagtctgactcggccattctatgtgcctcaaaacagagtgcaggcggkgcacggtggctcacacctgtaatcccagcactttgtgaggccaaggtgggcagatcacttgaggtcaggagttcaagaccagcctggccaacatggtgaaacactgtctctactaaaaatacaaaaattagctgggtgtgttggcgggcgcctgtaattccagctactcgggaggctgaggcaggagaattgcctgaacccaagaggtggaggttgcagtgagccaagattgagtgaaactccatctgaaaaaaaaagaaagactaaaataatagggcttagtctaccctaacttattctcatcttttaggagatttttgcagaactttaacaattatcagtatccctgacctcaatttgatgctgaaaagtatgctaggtagtagtaattttgaaagctatttgcttttttggttggttgtaactcaaattagtaaaaatgaacatgggtttgccccggggggcagagggttcaagtgagcccgtgatcgtgccactgnacttcagcctgggtgacagagagagactctgtctaaaaaaaaaaaaaaaaaaaaanggggggcctttttaaagg

SEQ ID NO: 275 - DNA, 476 bp, Homo sapiens
cttccatctgaccccagaaattttaagtatcatttaatcttgcttaggaacagtgagatttatttctcatatgtagccaaaatatgaaaggaaatatgttcttgattttttttttgactgacattactgaacagtatatggctcttttttgtttggttaactaaatgcagaaagagccctgatctaaattcaaagttggattcataaacagaatgagtawawatgaagaggattctatttataaacattgtcagagtgtcataaatgagtaaatatgaaaataactagaatcacataaaataaaatctgagaactcagcctgcatttcaaagaacatcattctatatgcttgtcagtgttcatattatattttactgtgggtggggagtataaaagatggaaagaaagatgtatgctatgaggctttttcccctctctttattacaccttaataaaacataaaaagataaaaaaaa

SEQ ID NO: 276 - DNA, 410 bp, Homo sapiens
  SITE (322): n equals a,t,g, or c
  SITE (374): n equals a,t,g, or c
  SITE (380): n equals a,t,g, or c
  SITE (395): n equals a,t,g, or c
gactcaaataccttctgcttttaaataagcattgtttttcttggatgmaaaattcatagtagtgatcaagaagaatatattcacttatgtgtgtagaaggtagttaaagagcacctactatgttctacgctctgtgctggctccatgaaaaggacagatacagacatttcctttggagctgagagtagagtgagagttttttaaaataattacccaatggaattatacattctccatagactatattcaggttaacgtttgatcacattaaaaaatcttttttgaaaaccttttatcatttcatctttccctatgggaattngaaaaaaaccttttatcacctccctctttcccccacaggaattccaatgggnaaggtnccataattccccggngctccaatttatata

SEQ ID NO: 277 - DNA, 535 bp, Homo sapiens
  SITE (18): n equals a,t,g, or c
  SITE (34): n equals a,t,g, or c
gaaaatgggggttccccnaatgtgggcccaaggnctggtctsgaactcctgatcycaggttatccacccgsctcrgcctctccargtgctgggattacaagtgygagccaccgcaccccgccctaatctcagcctttttatatcttcttggtaggcccactttttggcatcccctaacaagaagtcctcagagatttttactactcaacatgtgtgcgtcccactcagatgtattgtgttctttctgttcaccctctacttcccattccatttcttcctctgacttagggttagaatggcccaatgatcctacaactttttgatgctatttcatttgattcctctactgtctaaatcacaagttggctaactttacttactgtaagggatcagatagcaaatagtttagccttgtgggccattcaatctgtcataactacccactctgaccatatgtagtgcaaaagcagcccttgacaatatataaatgaatgaacgtgaatgtatttcaataaagctttacttgtggacactg

SEQ ID NO: 278 - DNA, 345 bp, Homo sapiens
  SITE (289): n equals a,t,g, or c
  SITE (295): n equals a,t,g, or c
cctgggtaaaaccagagttcctattataatcaagttttctaccagatttataccaagatagagtcctactggcagtgagtgagagacctatctcaccatactctcaccaacactggaagggatcaaaaggataaatagaaaatatgtgttttagttagtagtgactaacattctgattcaaccctctcttggggcctaagtttccttatgcatataaagagatagatagggaggcagctggagtatgtgatgcctgaagctaacattcaatggtcccttccatccttgntgctcnttctttagttgtataatgtatgtctggaattaactagtttctctcttatt

SEQ ID NO: 279 - DNA, 440 bp, Homo sapiens
  SITE (421): n equals a,t,g, or c
  SITE (422): n equals a,t,g, or c
gagattgtagtaggagagtatcatgggatactctctttaatatttacacagaattatgaagggatacacaagaaggtgaattccccttttaagaaatataactgttaataaaaggaaagcaattttccattttgcacaaatttaggacagaaatattcaaagagggtagtgactacagtttcttcacacttagatgagagaataaacaaatacacaacagtagtgatggtaattatcagaggaagaattattaccatatatatacttcattaaaatggatatatcttttctcatatagagaaataaaaacttgattgtgaagataaatgggkctcagcagttgctaagaaaatgactggktacyttctgkcccytttgaggagcmtgcagagaaattgctttagcctctgataaattaaanngactgcgaggaaaattac

SEQ ID NO: 280 - DNA, 452 bp, Homo sapiens
gattatgtggtgctttggaagctgggaccacatggactcttaagagggatggcaccttctaagaggttccaagggcggaaacaaggggcagttccactgggtttcagacacagagatcccagcctggattgtcgtggaggatgaagctgctccatcttggatgctgatccgccatgttgtcctctggttaacccctgttctggaatgcctcctctaagattgccactttatctactgtgaccttaaatcctgctcttargtwgattcacatagcattctgcgcctttccctgaggggttgacttcagtggtgccacacatttctactgaggcatgtgtaccttttgcatcaggtatatcagccctgggactcggggataactgactgacggctgcctggcttctgtttctaagttgctattaaatgtttctttctgagaaactggatacatc

SEQ ID NO: 281 - DNA, 349 bp, Homo sapiens
  SITE (346): n equals a,t,g, or c
gcccattttatcctgggtgtgagagggaaaagaaatttacatccctttgctttagagtcygtggcttatatgccacggtgccttcagttcactttatatattcatgggtataatttagtagggacgagggagggtgcaggagggaggcaaattgtcctttcttcagtgaatacaggggaacagatggttgttatttgctgagtgattctggaaaatcactaccttgrattctcagttttggagtctgactttgttctgtcaccatttccccagttaaacaggaataaaaaacgagccacatttgacaaggaaaaacactgcttggcccaaaaaacaacattgttcngat

SEQ ID NO: 282 - DNA, 356 bp, Homo sapiens
  SITE (156): n equals a,t,g, or c
ggagagaaggaagtgaaaaggaacacagctgtaacaactgttgccaaggaggtgggcatttgctttggatcagctccttgaatttgtgttggatgggtcttctacagttgattatagctgttggccctctgaacttagatgactaactgattaccntgacctttaggaaatttccagagtgtctaaatttccagggcagagtgtctctagatttgaggtaaacagagactcaagaaaaacaaaaaaaagtagactcaattcttgcctcagtttaggaaaaaatctggcaactgcagctctagtcaataatggccccgaaaagtcaggagagaaggcatgctctgagacaaacacaa

SEQ ID NO: 283 - DNA, 613 bp, Homo sapiens
  SITE (97): n equals a,t,g, or c
  SITE (107): n equals a,t,g, or c
  SITE (194): n equals a,t,g, or c
  SITE (428): n equals a,t,g, or c
gctttcctcaactggaaagcaattattgagggtgcggacgcgtcatcactgcagaaacgtgcaggcagagccgatcagccgggtgcagggatggcangaagtggcanctgtaacttccaagaactacaattacaaccagcatgcgtatcccactgcctatggtgggaartactcagtcaagacccctgcaaagnggsgagtctcaccttcttcctcggcttcccgggtgcaactggcctgctgcagtgggtgaagttttggtaggcggmaagaagtgaggggcaccacaggcgaacaggcaatttcttgcaaccaccaccgaggccccgaaaagcactggtcgtcagggagctcctccccttggcccccagcctgtgccagccctggcccggctgccacacctctgtttcctaggctggggaccmarntttgtctctccttgtttcttcccactgmactgtggtgyttcagtggccaccagcctcgtcacatacaccagcatctttctgtacctcctccctttggtgacctgaagtcactgtgacagttctccaggaaggaggagcttcctacttttgagtttctctgtggaaataaacatgaatcttgtttc

SEQ ID NO: 284 - DNA, 410 bp, Homo sapiens
cttaagtgtgtatttgtgttggattgttctaatttcaaaacagagaaagttttgaactcctgctttcatggttcattcttagaaataaatagaattgttttcccaagaaaaccttggaaaactttctagtaatagcaggaggaatatgggagtaggaaatggcaagttgaaggattttaatttggaaactgccaccttttggaatacaraagarctggttatgggattggcccctggctttacttgtcsttaacatgggctttgatwaggsgaaaacaaagtgagggcttcgarccacaagtcaargtcttgggaaagcttarcaaaatggtgcaagtctctcgtgatatctacctttatgcttactgctttctattggcaaaaatctctcatcttttgcagatgcctga

SEQ ID NO: 285 - DNA, 548 bp, Homo sapiens
  SITE (547): n equals a,t,g, or c
gctcgtgccgaaaaacagaaccagtaggcatgtgcatgtgcatgtgtgtgtgtgtaaagtgggggagttaaaaagaattggctcacataactatggagtctgagaagtctcaagatccgtagttggcaagctggagacacaggagagtagatggtgtagttccagtctgagggcaagaaatgactgcttgacctagctcaagtagtaccagtcaggccagaggagccccctcctttttgtcctattccggtcttcaactgattgattggacaaggcccacccacattagagaaggcaatctgccttcttcagtttaccaattcaaactttaatctcatccagaaataccctcagggacactcccagaatagtgtttggccgaaagtctgcaccccatggcccagtgaagttaacacataaaagtaaccatcacataaccctagactactgctctcccacaccmtccacatctacgtgacacaaaatccagttggtttcaccttctaaatatttctcttgtctgtcatgtctgcactccagcctgggna

SEQ ID NO: 286 - DNA, 344 bp, Homo sapiens
  SITE (274): n equals a,t,g, or c
  SITE (297): n equals a,t,g, or c
  SITE (333): n equals a,t,g, or c
ggcaaagagtacagagactacatttatcgagcacctactaaagggcaggcctggtgcaaggcttttttacatctgtaatcacatataatccttagcacaaaactgagatatgttactatcttcctaatttcacattcaaaaaactgagatcagaggttaagtatatcttatcacataagcttggaaatggcagggcaggaatttgaacttaggtgcttctgactcaaatccatactcttacagtagactatctctctgttgcacatggtgaggntctttatgttcattgtggagggnaaagggagcccaagtctagagattgagtataaagtntggggccaaaa

SEQ ID NO: 287 - DNA, 468 bp, Homo sapiens
  SITE (453): n equals a,t,g, or c
gattccttaaaggaaagcacaacattccagtcaaaacttggtaaaataaccagtttctccagttgtgtcctgtgcaaaagaaaacagattcttacagaaatataagggattgatgggtaaagagtttaaaagctgtttatacatgcagtacattggatatgatataatttatggtttcttgtttgcagctgtttgtatctttttaatcccaaaccagacaaaattataaacattttatatacaatgttatcttggaaaaagttagatgtaaataattcatcttaatctatatttgagaaatctgaggggtattaggaaactcatgagtgartgaacatatagattggatcaaaggaggagagtatgagagtagggagaccaggtwaaaaggtatcatagtcggccgggcgcggtgggctcacgcctgttatcccagcactttgggaggccgangcgggcggatcacga

SEQ ID NO: 288 - DNA, 392 bp, Homo sapiens
  SITE (386): n equals a,t,g, or c
aacattcccctcagaagtgtctcaacactgcagagccactgtgtatagaaaatgccagcttatctgcaggcagaaccaccaggcctctgcagacactgctctcacctttctgcccttccctccatctgtttacatgtgcatgcataattccacattcactgaagtcctcccaggcactgttctaggatctgagcacgacgctgtggcgctcgtggaatctacattcaaatcaattttgacctatctgaaagagaggatacctttgtrggargctctaracccacactgtgtgtcacagaaagcacttagcccttatggctattgaatttaagttaagcaaaattcaatacaattaaaaattcagggccgggcgcggtggttcacgnctgtag

SEQ ID NO: 289 - DNA, 458 bp, Homo sapiens
gcggcacgagcttctgatacagtgagggagaaagacaagagtggcaagacagtgtattttctctggaacatagtccatcctcccctcctcacggtctctgcctgagctcagagccccatctgctttcccccagaccctcttgactcggggttgtctgagagcctgcaacattggcatcacctggggcttgttggacatgctgactcttggattccacccaggcctgctgtagcatatcttctactgtaacggaatcgccaggtgatgaatatacacatccaagtgttggtgtgctgccctagaaggtcaggattaacagttggtattttcccgttgtcccaagcacctattctcctttaatccattctgaacatcaactgggttctagtttgaaaacaaaattcagstgtgtctgttctttkgcctaaaatccttgtttgggtttcacattgcttttt

SEQ ID NO: 290 - DNA, 520 bp, Homo sapiens
  SITE (512): n equals a,t,g, or c
  SITE (518): n equals a,t,g, or c
  SITE (519): n equals a,t,g, or c
gttaattttcaagattggggttttgatttttatggagctcaattttggagggccttaggtttggggacacatggtgttgaagtaaacaggtgagaagaagaaaagtgagatttctagaactatattagctgctcagtgagttgggcaattggatatttttggttttatgatttcagattttatagaccagtggaatacaggccttgtgcatatgaagatcaggtgacaagtttgctgcctaccagcctccacagcaatatgccctttcacggtgaggtccyaattttaacaagcyaaagaaagtatcaggttaaaaattgtcmaattttatccatttccaggaagaagtctttatgcttacccatctaggcccgtgttttaagattactacaaaaccaagaaaatgcacatataggtcatgtgtacattgactagctactaaaagaaaatacgagattaaatggaatactagaggaaagagaaactttcatgtgagggctataattggaaangggggnnt

SEQ ID NO: 291 - DNA, 517 bp, Homo sapiens
  SITE (24): n equals a,t,g, or c
caaaaacaaaaaaccaaatttctntccagggttcaaatgtaaactacagacaggagattcccataacaacatatgagggctttaggaaaaaacaaaacaaaaacaaccctggaagatttcaggataaatagaggacacgtttttctaccaaacatactttcaaaagtagaaaatcatggatttaaaaacttttttgtagggcttgatatgtctaaatgtatcaagtttcaagtgtgctaactttatgaacacttgtctctgttcttaaatgcataacatgatcttaaatttttcagatctttagaaatgttaagcaatgcaaagattctaccccatctccctccacatctttaaaagccaaaaaccacctaccaaaactccattactgtttgtgaatgaagaattttcatgacttgaaaacctcctaatgtyccatctttaacacttttttagaaaggargggtcttgttgtgttctttaamctcctttccacatcattaacttcctccatgggttg

SEQ ID NO: 292 - DNA, 458 bp, Homo sapiens
  SITE (433): n equals a,t,g, or c
  SITE (448): n equals a,t,g, or c
tgagaagtaaatgtaacgtcctgagtatctgtcagaaaaaatactaatgaatacgatcaatcttatgagctgccccaaaattgtttcagtatgttaacaattggattacagtaaagaacaagttgttaaagtatacttatattggctggaaacattgcatcatcagaccttgatgaattttccacttgtttcaatctattttggttttcattttatcacctattgctaaaagtttcactgtgttaagtttcagacaacatgaatgttaacacaggttttaggcgaatattggcatgccagagccgttatcatgcaggcaagtgctaagctcccttactcatgggagtgtttcagcggttagctttgacaaaatttagtttctccaaaaccaggaaagacacttttgtggataggcagtttggacttgaatggntttgtttttacatcngttttaacgg

SEQ ID NO: 293 - DNA, 903 bp, Homo sapiens
  SITE (602): n equals a,t,g, or c
  SITE (858): n equals a,t,g, or c
ccaatagaactcagaacgccagactttctgaagttcttcctcagtcttcttctctgagacttctactccttggtcctagctttgttcctaggcgctgtgccgctgtgtcayccaccctgccctgtacaatatgcaggaagcaagcgaggagggggtgcctcagagagacagtaaggaggaatgaggacaaggtggaattggcatgggcacgtcctacagagtgagaggcaggccttagggcaccacgtcgctctcagctggaagtagcagtggtcacaactgagagagccaaacatttctacagcccccaggacattcctgtcaccctctacagcgacgctgatgaatgggagatgtggaagagccgctctgacccagttctgcacattgacctgcggaggtgggcagacctcctgctggtggctcctcttgatgccaacactctggggaaggtggccagtggcatctgtgacaacttgcttacctgcgtcatgcgggcctgggaccgcagcaagcccctgctcttctgcccggccatgaacaccgccatgtgggagcacccgatcacagcgcagcaggtagaccagctcaaggcctttggntatgtcgagatcccctgtgtggccaagaagctggtgtgcggagatgaaggtctcggggccatggctgaagtggggaccatcgtggacaaagtgaaagaagtcctcttccagcacagtggcttccagcagagttgacctggggatttctgtcatgggtgtccctctgtactcagaatgggttcaggccaagtcggtgaagatgggatgttggcaaaatagggaggataccctcattttgctgawtggggggacttgntcttgagccttgccccaggggccaagggcttgcttcccaggttta

SEQ ID NO: 294 - DNA, 407 bp, Homo sapiens
  SITE (403): n equals a,t,g, or c
catagggctcggcgtccggctttwgaggatwycctmggtccccgggcggaaatagctggaatggaggggcctctygattggagacttactggtcaaatatttacttttgttgatcactggaaacgctacctaccacgcattgactaggaccacagtgaggagggaacgctttagatgatagagttttgtttgggggcttttttttgtttttttttattccagggaattcaggaaattgccccagaagtccgatttctgatgtgtaaaacctttttttacagaaaaccacggacttcctgggaaaagtcttcaccgtaaatattaatctctttgggcatggaagagggaaaacactggcagctaattttttcatgggggttaaccaaaaatattaaactggcanttcc

SEQ ID NO: 295 - DNA, 866 bp, Homo sapiens
  SITE (717): n equals a,t,g, or c
  SITE (761): n equals a,t,g, or c
  SITE (786): n equals a,t,g, or c
  SITE (825): n equals a,t,g, or c
  SITE (841): n equals a,t,g, or c
  SITE (860): n equals a,t,g, or c
acccctatagggaaagctggtacgcctgcaggtaccggtccggaattcccgggtcgacccacgcgtccggatcgggatgcaagattkttgagactcactggtctgaaactgcctttcctcttaaatttagttaagtatttccctgggcatggaattcaaaggtggttatgacttttcttcaggattgtgaatgtatttatatcctcccatcttacgttgctattgagaattctgaagttcttctgattcctgattctttgtatgtgtattcctcattccacaccttccccagaatgcatgcagaatttcttcctttctattktcttttctctttttctgaaactcttattattgggatcttctgcctcttggtttagggctctaattttccgacattttctctgctattttttactactttatttttctcctctactttctgagagatttcctcctcttgatcttccaaatcttgtactgaatcttttatttttgttaacatgttcttaatttccaagaactcttttttcttgtcttcggagtttcaacacttattgttgttttgtgcatgtattattttttcttctctctctgaggctatttaggaaattttttattgaagctcctcccccctgcttccttcaagttgcttttatctgcttttttatttgcttttcatgcaataagtttttctcacatgtcggtaactctggggantaccaaaaactcatagaaaattctgaccatgtgagtaacactgncaatttgagctcatgatagaagatnagcggacctttgcgcgggaaacggagtgatacttccacngcaagtgaacataagncagtagcggtgcgcttagnaagaag

SEQ ID NO: 296 - DNA, 527 bp, Homo sapiens
  SITE (492): n equals a,t,g, or c
  SITE (519): n equals a,t,g, or c
cttaatgaaagaaagtaacgatttatgggataaaaatattccagtggtttgtatttgcttcatacttcaaaagtgttagtccatttattgtttaaagttatattgaaactgatattttcactgctgccaaagcgtacctgacagtagataggtatccacagtcttatgttccttagagttatagaactatgcctctgaaaggggttttaatactttaataaacctggcctaaactgttttatttctaagttgaagaaactgattgtcaagtactttgacttgtccaatctcatacaactaactatggtacatctagagttagatctcagtatcaggggtcccagttgtattctgcttcaccattccacaatttcgatattgataaaactttcacactaacttttgaactgtggttattattaatttagttgattcatgtccycttatttatctccttactcctccactgctgccttcataactgtccaccanatcaaagctatttgggtacctacactntaaagtga

SEQ ID NO: 297 - DNA, 469 bp, Homo sapiens
gcggccgctggaggcgttgccgccgcccgcccgaggagcccccrgtggccgcccaggtcgcagcccaagtcgcggcgccggtcgctctcccgtccccgccgactccctccgatggcggcaccaagaggcccgggctgcgggcgctgaagaagatgggcctgacggaggacgaggacgtgcgcgccatgctgcggggctcccggctccgcaagatccgctcgcgcacgtggcacaaggagcggctgtaccggctgcaggaggacggcctgagcgtgtggttccagcggcgcatcccgcgtgcgccatcgcagcacatcttcttcgtgcagcacatcgaggcggtccgcgagggccaccagtccgagggcctgcggcgcttcgggggtgccttcgcgccagcgcgctgcctcaccatcgccttcaagggccgccgcaagaacctggacctggcggcgcccacggctgagga

SEQ ID NO: 298 - DNA, 506 bp, Homo sapiens
  SITE (469): n equals a,t,g, or c
tataattcaccagtttaattatgtgagcatgttgagtacttacatgcaggtccattaatttttcactaacaattattttttcatgcaaaagcaataaataacattgtgcttccaaaatgttcagaatacatttgggtagtaatactttcctagatttacaataattattgaaattattattatgacatctttaaatggatacacaggtcagttacaacataaaaaatgtaatggtggaaatttgtcagccttgaattcaggcagaacaggattcggtgcatgattttatgtgttttcgaaacggtgtctgtcacattgtgatcccctgatggstcccctctctgttgctgatcctctttgttctgtacagaagcaaattctcacctgtgtaacatcctgaagcacckggtaaaatgtgaggcaaagrgrggccacttctcaaatgctgtgggacgggtggggtggctcnttttaaagggtatccgtatgtcttcccgttggcatta

SEQ ID NO: 299 - DNA, 569 bp, Homo sapiens
  SITE (492): n equals a,t,g, or c
  SITE (538): n equals a,t,g, or c
  SITE (549): n equals a,t,g, or c
tttctgtcggcactgcagcattctcttttgaaaggactcagaccaccccttcacggtggccgaccttgacagctgcttcacgcctgtgtctccgcagcacttcatcgacctcttcaagttttaagggctgcccctgccatccctattggagattgtgaatcctgctgtctgtgcagggctcatagtgagtgttctgkgaggkgggtggagactcctcggaagcccctgcttccagaaagcctgggaagaactgcccttctgcaarggggggactgcatggttgcattttcatcactgaaagtcakaggccaaggaaatcatttctacttctttaaaaactccttctaagcatattaaaatgtgaaattttgcgtactctctctctctatatatatagttcaaaaatactttaggtggtcagctccacattctttgttgacgtgacactaacggccaataatatggcttcttgaattatcaaattatagtttncccaattgggaaactaattggggggttggttacaaaacatttgatncctgttaaatnacattgtaccaggattattt

SEQ ID NO: 300 - DNA, 532 bp, Homo sapiens
gaattcggcacgagcccagaaccatacgttgcacttttgtttcagttagaagtcttccatgggcttttcttccagtcacactaaagtagtatttgcagaaatgaagtttctttgggtcttgttttgtttttgtttttgaagatggaatctaagatcatctcagtttagttctttgcctttttgttgttgttgtttttgagctcatatatggggtatgtaggcctttggccatttgaagcattgcagggaatggtatgttttagttggtgcatttgttactgtaagaaatcagcaaatggtttgtggtgcctttwaagattwatttagcacatawttttccyatgggctaggtgcygagctggatgctggggatgcacagatgagaaaggcacagcgcctgttctcagattgtctcacagtctagtaggaaagagagagacacatcaacagctaactctgatacctaacgatctggatagaaaatttcaggtcagggcactggcatgaacagagattgagaacagataaatgc

SEQ ID NO: 301 - DNA, 1005 bp, Homo sapiens
  SITE (960): n equals a,t,g, or c
  SITE (996): n equals a,t,g, or c
  SITE (1002): n equals a,t,g, or c
gggcccctcgmgggatcctctagagcggccgccctttttttttttttttttttgagatggagtctcattctgtcaccaggctagagtgcagtggcatgatctccgctcattgcaacctccgcctcctgggttcaagtgattctcctgcctcagcctcccaagtagctggggttacaggcgcccaccaccacacccggctaattttttgtatttttagtagagacggggtttcaccatgttggccaggctggtctcgaactcctgaccgcgtgattggcccaccctcagcctcccacagtgctgggattacaggcatgagccactgsgcctggccaacagattttttttctttgagacggagtttcgctttgtcrcccaggctggagtgcagtggcacgatctctgctcactgcaagctctacctcccgggttcatgccattctcctscctyagcctcccgagtagctgggactacaggcgcccaccaacacacccggctaattttttgtatttttagtagagatggggtttcaccgtgttagccaggatggtctcgatctcccgacgtcacgatcctyctgcctcggccttccaaagtgctgggattacaggcgtgagccaccacgcccagsctaawttttttgkatttttagtagagatggggtttcaccgtgttagccaggatggtctcgatctcctgacctcgtaatctgcccaccttggcctcccaaagtgctgggattacaggcgtgaggccgacagtatttttaaagggagtaacatgatgagatttgagttctgaaaagatcattctggctacaatatggagaatgacctggagagcagcggggggacaggcagaacaggcccacagggagctgttgccatcatctgctgagagatgacagtagcctggactgtggcagtagtgaaggagttggaaagacgtggacggattanagtggaaagtggttcttcactgggggggatttttgncctcanggg

SEQ ID NO: 302 - DNA, 428 bp, Homo sapiens
  SITE (316): n equals a,t,g, or c
  SITE (363): n equals a,t,g, or c
  SITE (397): n equals a,t,g, or c
  SITE (411): n equals a,t,g, or c
aaggtaaaaaactgggactcttagttcggtttttagatggggttactaatggtgaccatcattcttccctgaagcaaataaacatgactgtatggaacttcatcatgttaaataacatgctgaggaacccagctagggaaatatcaccaaggggaagatggattgttaatggaatttgaattagcctagctgtccctcctgttgattgtaaataaagcaggaagtcactgccctatccacaccaccaaatgacctcattttacaattgatttctgaggaaggtgatattttaaaagggcatacaarggtgacctsntatatttwtatagttgggtaaggagctcattttattttttgaggacnggggactcactctgttgcccgggcttgaagtgcngtgggtgtggatcnccgctcactgcagcctt

SEQ ID NO: 303 - protein, 29 aa, Homo sapiens
KKKKKKKKKHVGRLGPVDSRLGASLYMRP

SEQ ID NO: 304 - protein, 70 aa, Homo sapiens
  SITE (35): Xaa equals any of the naturally occurring L-amino acids
  SITE (54): Xaa equals any of the naturally occurring L-amino acids
  SITE (61): Xaa equals any of the naturally occurring L-amino acids
  SITE (67): Xaa equals any of the naturally occurring L-amino acids
  SITE (69): Xaa equals any of the naturally occurring L-amino acids
CNKHVLFHAVSEGLESGSSLASGCGLGLPQCCRQXVGWDWTICFQISKLFSPSXGGPKLPXPSIFPXEXN

SEQ ID NO: 305 - protein, 99 aa, Homo sapiens
  SITE (40): Xaa equals any of the naturally occurring L-amino acids
  SITE (79): Xaa equals any of the naturally occurring L-amino acids
  SITE (81): Xaa equals any of the naturally occurring L-amino acids
  SITE (83): Xaa equals any of the naturally occurring L-amino acids
KAVLLAGVCLALGPGAAAIERQRHREFLKTHIWWGFLALXKMHDFPKDPGSVSSSPGSFPRPHLHVGVSGGENGVPKLXPXLXGLGLPVGVHTASFSGG

SEQ ID NO: 306 - protein, 55 aa, Homo sapiens
  SITE (48): Xaa equals any of the naturally occurring L-amino acids
  SITE (53): Xaa equals any of the naturally occurring L-amino acids
VLKVLTYFRCLNKVNFQLLHVTYIKLSFSFILVNCLHNKFKGKFAWQXSDSRXEI

SEQ ID NO: 307 - protein, 66 aa, Homo sapiens
ARACSGHLGMDLSPGIIVVTDSHGHRDMGYRPGPTTHWLCDLGRFCKYSRLAAWLIQKAPPTGPGA

SEQ ID NO: 308 - protein, 60 aa, Homo sapiens
NVPAQPHQVSTVKVRAFIGKEWDTVTWNGDVWEDPDKAGNTEFVNSDETFLPEETASHPQ

SEQ ID NO: 309 - protein, 52 aa, Homo sapiens
KDNLELLLMNHYIKPGLKNNFKETAFDIARRTSIYHSFFVMVEGYTNSSPQS

SEQ ID NO: 310 - protein, 55 aa, Homo sapiens
  SITE (42): Xaa equals any of the naturally occurring L-amino acids
  SITE (51): Xaa equals any of the naturally occurring L-amino acids
SVLLYRGFLTSCEAELQELMKQIDIMVAHKKSEWEGRTHALXTCLKIREQXLKSL

SEQ ID NO: 311 - protein, 59 aa, Homo sapiens
QRYVINPNAQPNCYVIPIPILCNICSFLERGYVSRAQWLTPVIPALWEAEAGGLPEVRS

SEQ ID NO: 312 - protein, 55 aa, Homo sapiens
  SITE (46): Xaa equals any of the naturally occurring L-amino acids
GRRAACRSQLWLGCWQVLAGLAGIAWTASGAPQPARPEGRLTAPPXPLLLGPRPE

SEQ ID NO: 313 - protein, 49 aa, Homo sapiens
  SITE (29): Xaa equals any of the naturally occurring L-amino acids
QARESGEGLSQHVPLCLCVSFALLFPLIXGCVCVFVYVCERERAERVLF

SEQ ID NO: 314 - protein, 20 aa, Homo sapiens
QKPEMPSMNCRLVMKCMLLL

SEQ ID NO: 315 - protein, 98 aa, Homo sapiens
  SITE (15): Xaa equals any of the naturally occurring L-amino acids
  SITE (19): Xaa equals any of the naturally occurring L-amino acids
  SITE (91): Xaa equals any of the naturally occurring L-amino acids
NISLPILFKHLLCVXSLPXSLMDESQHYACLFPILVRRQGGRLSLHYILLLVSYGVQDSVLGVKGQVSPKKSKQGLHNLREKVKPMVAIGXHAQAEAG

SEQ ID NO: 316 - protein, 51 aa, Homo sapiens
PRKHVPDTKLPLKNDGTLLGIASEFTHRQGFPKGILKFKGRFISRQLCSRV

SEQ ID NO: 317 - protein, 47 aa, Homo sapiens
ISINRRMAKLWTNHTVEYHTFLKKVEAVICTNMKDFQDWRMEKSKAG

SEQ ID NO: 318 - protein, 64 aa, Homo sapiens
  SITE (52): Xaa equals any of the naturally occurring L-amino acids
  SITE (55): Xaa equals any of the naturally occurring L-amino acids
  SITE (62): Xaa equals any of the naturally occurring L-amino acids
SANMGKKRTKGKTVPIDDSSETLEPVCRHIRKGLEQGNLKKALVNVEWNICXDCXTDNKVKXKA

SEQ ID NO: 319 - protein, 49 aa, Homo sapiens
  SITE (33): Xaa equals any of the naturally occurring L-amino acids
  SITE (38): Xaa equals any of the naturally occurring L-amino acids
IFPIKVIYVYGKFSNSINMSPPNFSSSEWRIMXHCYIXIHKFLSWANFI

SEQ ID NO: 320 - protein, 43 aa, Homo sapiens
  SITE (25): Xaa equals any of the naturally occurring L-amino acids
  SITE (33): Xaa equals any of the naturally occurring L-amino acids
KELFAMLTLKGFLSSHPGMDRAGSXETSEQVFXTVRVRVEHRQ

SEQ ID NO: 321 - protein, 54 aa, Homo sapiens
RYPHFTDEEIGSEKKLTEGHTEGRVRDPLQALSYSSGHLLFTSHPIIKYKTKRS

SEQ ID NO: 322 - protein, 97 aa, Homo sapiens
  SITE (71): Xaa equals any of the naturally occurring L-amino acids
KRQGSHLGEFLAPFDLAVLRDAARSEDCKDFLLSACLEILQDEHPPYLIIYFFLSQETWRHVKIHFMSFSXYFILRGWVVVWVPLFISLFEYRIDWL

SEQ ID NO: 323 - protein, 28 aa, Homo sapiens
KDTIRLPCPVKKFIDIEREKIPLDRKSG

SEQ ID NO: 324 - protein, 60 aa, Homo sapiens
  SITE (27): Xaa equals any of the naturally occurring L-amino acids
KESPGFWFEKKVQETGEIALTYIMFFXFVFETGSHSFSKATMVPCGLYLLGASGVPASVS

SEQ ID NO: 325 - protein, 48 aa, Homo sapiens
  SITE (4): Xaa equals any of the naturally occurring L-amino acids
PHLXSFAHSLSPTLCLFLSLSDFYSLNHLRVCCTPHSSLLPNHPMCTF

SEQ ID NO: 326 - protein, 46 aa, Homo sapiens
FSRSGIGAWDSAFLTNSQMLKQVVFEPHFKWQDLRSPLKYQFLNTT

SEQ ID NO: 327 - protein, 51 aa, Homo sapiens
  SITE (45): Xaa equals any of the naturally occurring L-amino acids
KKKTVTKNTKLIKEEGRGKWNNRACSTRSTSHAVSPSELAPRASXSGRLLL

SEQ ID NO: 328 - protein, 34 aa, Homo sapiens
  SITE (7): Xaa equals any of the naturally occurring L-amino acids
RDVILCXGYNVHYSGDGCTESPDFTIVQYIHVTQ

SEQ ID NO: 329 - protein, 43 aa, Homo sapiens
VSLVDFCLTFSTFTKLFKSVNIYIKNLFGFVSRFAHLTFNNPL

SEQ ID NO: 330 - protein, 128 aa, Homo sapiens
  SITE (99): Xaa equals any of the naturally occurring L-amino acids
  SITE (114): Xaa equals any of the naturally occurring L-amino acids
  SITE (118): Xaa equals any of the naturally occurring L-amino acids
  SITE (125): Xaa equals any of the naturally occurring L-amino acids
  SITE (128): Xaa equals any of the naturally occurring L-amino acids
SSSQGYGSVCLDIVWNCALSPQASPELKGSKNILKLLFQNMRFRRNQVSPGERGSLLNQHRELLAGRLPSAVESPPASGLGAPSHFLLLMEYMGLLCFXAAIRAVVSRTRLRDXEVRXGDAKDIXDVX

SEQ ID NO: 331 - protein, 36 aa, Homo sapiens
SCSLEFKGWKPELNLCCSVEAEFPPLKKTSGLQLIA

SEQ ID NO: 332 - protein, 77 aa, Homo sapiens
  SITE (66): Xaa equals any of the naturally occurring L-amino acids
KGDLRRALREETLGFWKAEMKVYSGQAQWLTPVNPSSLGGQGRQIMRPGVRDQPGQHGEIPSLLKXQKLAGRCGGHL

SEQ ID NO: 333 - protein, 112 aa, Homo sapiens
MSYVVTKTKAINGKYHRFLGRHFPRFYILYTIFMKGLQMLWADAKKARRIKTNMWKHNIKFHQLPYREMEHLRQKALSRAMLLTSYLPPPLLRHRLKTHTTVIHQLDKALAK

SEQ ID NO: 334 - protein, 55 aa, Homo sapiens
  SITE (25): Xaa equals any of the naturally occurring L-amino acids
PPDCQGSSMWHLRPWAGHAGPPQVXRNHEPQLSPLQALPKGEASESMCYLNKYRV

SEQ ID NO: 335 - protein, 71 aa, Homo sapiens
  SITE (58): Xaa equals any of the naturally occurring L-amino acids
VAPTRRILEVAQKASLFLWDCDSRLPRGTEHSETLDIYPENTRKGDLATTCSQVWEAXVFLTGKRFWFFQP

SEQ ID NO: 336 - protein, 36 aa, Homo sapiens
PFYIGFFHLVICMQLFSVSFYGLIAHSFFSIELSCF

SEQ ID NO: 337 - protein, 56 aa, Homo sapiens
  SITE (1): Xaa equals any of the naturally occurring L-amino acids
XSFILSKLILWDLRFKNEINFAHSSHGWALRQCCKAVIVCLMGRSEKELKFMVCLL

SEQ ID NO: 338 - protein, 87 aa, Homo sapiens
WNPRPDSCSFKQPPPSIPVYLPYLSTTTGNLKDSTTHFKSLAMERRGKGGAASLGESVFGMLEWEPVCRSHRAGLKMNGKEDERKRR

SEQ ID NO: 339 - protein, 85 aa, Homo sapiens
  SITE (11): Xaa equals any of the naturally occurring L-amino acids
  SITE (38): Xaa equals any of the naturally occurring L-amino acids
  SITE (63): Xaa equals any of the naturally occurring L-amino acids
  SITE (72): Xaa equals any of the naturally occurring L-amino acids
PRRPGARASLXEEAPVCTHVRPLKRTWCFCAHLHTVCXNLPTKKRNGIKTDVRHGIELIFRRXTDELGKFEXFSTRVKTGVSFLS

SEQ ID NO: 340 - protein, 57 aa, Homo sapiens
  SITE (30): Xaa equals any of the naturally occurring L-amino acids
LHVTIQEEMERGLKTEVSLKQIYRARTIKXEIQHPSHLWIGVLGSSKCHCTFKCIIS

SEQ ID NO: 341 - protein, 37 aa, Homo sapiens
SSTNQRRVKGNPERDKKMKPDQKVSCRGRQGQKVFLM

SEQ ID NO: 342 - protein, 158 aa, Homo sapiens
  SITE (29): Xaa equals any of the naturally occurring L-amino acids
  SITE (34): Xaa equals any of the naturally occurring L-amino acids
  SITE (89): Xaa equals any of the naturally occurring L-amino acids
  SITE (115): Xaa equals any of the naturally occurring L-amino acids
  SITE (122): Xaa equals any of the naturally occurring L-amino acids
  SITE (137): Xaa equals any of the naturally occurring L-amino acids
LQVISGQQLPKVDKTKEGSIVDPLVKVQXFGVRXDTARQETNYVENNGFNPYWGQTLCFRVLVPELAMLRFVVMDYDWKSRNDFIGQYXLPWTCMQQGEPAPLTPGQYPSSGCLXNAVLLPXPGYRHIHLLSKDGIXLSPASIFVYICIQEGLEGDES

SEQ ID NO: 343 - protein, 197 aa, Homo sapiens
  SITE (53): Xaa equals any of the naturally occurring L-amino acids
  SITE (97): Xaa equals any of the naturally occurring L-amino acids
TPGPKGSRGSLGPTGAPGRMGAQGEPGLAGYNGHKGIVGPLGPPGPNLGCSSXTIEVSCNFTHGGQTCLKPITASKVEFAISRVQMNFLHLLSSEVXQHITIHCLNMTVWQEGTGQTPAKQAVRFRAWNGQIFEAGGQFRPEVSMDGCKVQDGRWHQTLFTFRTQDPQQLPIISVDNLPPASSGKQYRLEVGPACFL

SEQ ID NO: 344 - protein, 43 aa, Homo sapiens
LQPLPPGFKRFSCLGLPKCWDYRCEPLHLARLTFKKLLILKKF

SEQ ID NO: 345 - protein, 30 aa, Homo sapiens
HRTLGIVCTQYMWSMLIRNKRSSKGQFLQR

SEQ ID NO: 346 - protein, 32 aa, Homo sapiens
  SITE (17): Xaa equals any of the naturally occurring L-amino acids
EQPEVRPFRNTLGMIGXIGYSAPSSRHMYHYP

SEQ ID NO: 347 - protein, 87 aa, Homo sapiens
  SITE (85): Xaa equals any of the naturally occurring L-amino acids
IQQKTRDEVVIYLSSFSIKLKWYVSAFSFQVWNHFHSRCIKLQFGGEAAQAEAWAWLAANAALHLCITTKESSAYRWKHGDYYSXYL

SEQ ID NO: 348 - protein, 92 aa, Homo sapiens
  SITE (59): Xaa equals any of the naturally occurring L-amino acids
FGTSPILGTSSVSNRLTAGWRRRSRHLATDGLARNCHPVRAAVAPGKVGALAVPESSEXRTWEPGQGWLTPCSASRGRQAIRLGAVLCGMDV

SEQ ID NO: 349 - protein, 66 aa, Homo sapiens
  SITE (52): Xaa equals any of the naturally occurring L-amino acids
  SITE (65): Xaa equals any of the naturally occurring L-amino acids
SSFLLYPSWITSLLETRTSFLHVLQPSFLYVYSMKLPRKNDTCSSPLPLKSXLSSVPPLWLSPGXP

SEQ ID NO: 350 - protein, 80 aa, Homo sapiens
HLFNLFKILSCNQYNNKWDLMSLILILIRYPTLFFCTTSLRSMDTTFYTYISMWTSHISSAPVATCGQWLNGVNGAAVGL

SEQ ID NO: 351 - protein, 42 aa, Homo sapiens
  SITE (33): Xaa equals any of the naturally occurring L-amino acids
AHAFKSSVISLYLEWSFPKYSIWTPAGTHDNFXMIHNSSFYF

SEQ ID NO: 352 - protein, 68 aa, Homo sapiens
GRCNHSYFTGSPSKGPMRSRPSPSSLWLLSPRKMCDPGMTAFEPEALGNLVEGLDFHRFYFENREQFL

SEQ ID NO: 353 - protein, 54 aa, Homo sapiens
  SITE (12): Xaa equals any of the naturally occurring L-amino acids
  SITE (47): Xaa equals any of the naturally occurring L-amino acids
  SITE (52): Xaa equals any of the naturally occurring L-amino acids
IPALWGGRGGRXQGQEIVDQPDPTWLKPRFLFKISKNLAGVLVGAHXLVPSXLG

SEQ ID NO: 354 - protein, 63 aa, Homo sapiens
HIDIYFIFHALSFFSHFSYSLLFPMPSGNVSNHSPSYEFIPQLYSFNPELNCLFLLYLIGPFL

SEQ ID NO: 355 - protein, 61 aa, Homo sapiens
  SITE (28): Xaa equals any of the naturally occurring L-amino acids
  SITE (41): Xaa equals any of the naturally occurring L-amino acids
  SITE (45): Xaa equals any of the naturally occurring L-amino acids
  SITE (54): Xaa equals any of the naturally occurring L-amino acids
  SITE (58): Xaa equals any of the naturally occurring L-amino acids
  SITE (60): Xaa equals any of the naturally occurring L-amino acids
TYMHLLVIWLQGSGFPTGGFYPPGDILXPFGGPFLDCPLLXWGCXCPVVGNWQXQGAXQXP

SEQ ID NO: 356 - protein, 103 aa, Homo sapiens
  SITE (75): Xaa equals any of the naturally occurring L-amino acids
  SITE (86): Xaa equals any of the naturally occurring L-amino acids
  SITE (100): Xaa equals any of the naturally occurring L-amino acids
  SITE (101): Xaa equals any of the naturally occurring L-amino acids
YSKEPYCQCCTCVIVENVRLLRSWWGSAIRERSRELRKKFGKHLLGAEEEEPWNGNNGRMGPFTFLPDMRLCPLXSSSFQGFWQFXFGGLRGLGKVSRGXXWV

SEQ ID NO: 357 - protein, 40 aa, Homo sapiens
  SITE (16): Xaa equals any of the naturally occurring L-amino acids
KVKFCEPTSWHRLCLXIGVLLGQSGSGQGDLRNVFRAFVL

SEQ ID NO: 358 - protein, 45 aa, Homo sapiens
  SITE (10): Xaa equals any of the naturally occurring L-amino acids
  SITE (28): Xaa equals any of the naturally occurring L-amino acids
  SITE (37): Xaa equals any of the naturally occurring L-amino acids
EKTEICWREXRRYAKCYNVLSLISGSLXDSENSTFSXLLTWCVWV

SEQ ID NO: 359 - protein, 50 aa, Homo sapiens
TRVFLLLQSQPRPSLQSWPGILSRNILPAAKGRGRPPHVNWKTAFPCWCT

SEQ ID NO: 360 - protein, 53 aa, Homo sapiens
  SITE (41): Xaa equals any of the naturally occurring L-amino acids
INKCRITTNKPVVDVMVKESVGIQRSYIDQVYYGNISATAXNINQFSKAYLHH

SEQ ID NO: 361 - protein, 46 aa, Homo sapiens
  SITE (28): Xaa equals any of the naturally occurring L-amino acids
  SITE (29): Xaa equals any of the naturally occurring L-amino acids
SAGLPVRERGCHNKQGIETLSHIEPISXXVGFLFSCKKCSFLPCGR

SEQ ID NO: 362 - protein, 44 aa, Homo sapiens
GRVNTSLYGINHILPIHSSADGHLGCFYLFPLVSNAAVEHGCGK

SEQ ID NO: 363 - protein, 109 aa, Homo sapiens
  SITE (59): Xaa equals any of the naturally occurring L-amino acids
ALKSHRAPTFTHTLRILGASLPCQESLDMFILESCHTTVISFPLPEQHLTELREPAPGXNQRQPARKPQRARGSEGGPRFGPSRIERTVVFSLGMWGSSCLPAFRGSSE

SEQ ID NO: 364 - protein, 47 aa, Homo sapiens
  SITE (17): Xaa equals any of the naturally occurring L-amino acids
  SITE (36): Xaa equals any of the naturally occurring L-amino acids
  SITE (46): Xaa equals any of the naturally occurring L-amino acids
VVALPQPWMPKNEGEGXTTVFCKAFLKDGALVSTWXCISHLHQRGXL

SEQ ID NO: 365 - protein, 49 aa, Homo sapiens
  SITE (21): Xaa equals any of the naturally occurring L-amino acids
GVRAPPGWKGNLRGHSGEPLXPCRLDCWNGKWSRETVTILGETLTPCPF

SEQ ID NO: 366 - protein, 70 aa, Homo sapiens
REGDRGRPRLKIQAIWQAGSRPLVGPGAVPTHSSASAPPQNVSPQQLLFGSPTFRDLTSWRSSHCHQPLH

SEQ ID NO: 367 - protein, 43 aa, Homo sapiens
  SITE (27): Xaa equals any of the naturally occurring L-amino acids
  SITE (29): Xaa equals any of the naturally occurring L-amino acids
LHAQHPSKWMSVILEQWPAQSMHNVIXSXYPLSSSASPFPFII

SEQ ID NO: 368 - protein, 58 aa, Homo sapiens
  SITE (57): Xaa equals any of the naturally occurring L-amino acids
NPNRYYWVEQEHMDRKIMLAVFGYVIYLKIQLLSKCLIEKIEAGCDGSMPAIPKRWXY

SEQ ID NO: 369 - protein, 87 aa, Homo sapiens
  SITE (66): Xaa equals any of the naturally occurring L-amino acids
  SITE (71): Xaa equals any of the naturally occurring L-amino acids
  SITE (81): Xaa equals any of the naturally occurring L-amino acids
FETFISLLFVHHPINPSVHCVASTATHLSLRFNFLFTGDLRAHHQIQRSRFPSTLTVSGEETVFRXAINVXQGPSHFCVGXKMVTPG

SEQ ID NO: 370 - protein, 94 aa, Homo sapiens
IPRLGPPLFSLTPAAGVSQSPWELGRGEKAEGHLGREEKGEELCPLDLAGVSSAQPSRCGPSKGWDGLVEPSGLGREAGEAEPRLGLLGALTSV

SEQ ID NO: 371 - protein, 47 aa, Homo sapiens
LCFRMPVVSAHSQPSQVHIHQSCQYVICSFIYVIYKSVELVIILSLS

SEQ ID NO: 372 - protein, 77 aa, Homo sapiens
  SITE (56): Xaa equals any of the naturally occurring L-amino acids
NPRWGRNPPELTWACVLPGSIAHCPGKVWAALYGGRKSRWTVSPMMVQSLKQETVXSKRRLTERTSVLLSLACGPYI

SEQ ID NO: 373 - protein, 43 aa, Homo sapiens
GLSGLSLDLFRAAVCLTVYLPFLFHSSYFQLPCLSVSIDTKVL

SEQ ID NO: 374 - protein, 35 aa, Homo sapiens
  SITE (20): Xaa equals any of the naturally occurring L-amino acids
YRIEYWAFKKLACLFPAGEXKENLKSWCEEHFRDY

SEQ ID NO: 375 - protein, 46 aa, Homo sapiens
  SITE (29): Xaa equals any of the naturally occurring L-amino acids
GLPKCWDYRCKPLCPAPISKFLRFMLVFXTLPIAYRYFFLLPFLYY

SEQ ID NO: 376 - protein, 75 aa, Homo sapiens
  SITE (33): Xaa equals any of the naturally occurring L-amino acids
  SITE (58): Xaa equals any of the naturally occurring L-amino acids
HQTNLKEVWVHRGQVSSSTVFGILGGGCNLGIXLKPYLLPSHSTPSSFQAGLACSRIXAQAPFVSVEVVPGSCQF

SEQ ID NO: 377 - protein, 69 aa, Homo sapiens
RETRLVSMHHVPDTMLQTKDAKTNTTPSSSSSCSNAAVRYYTLKYHCDWFRDGCKMSGTVRPQPCYFCE

SEQ ID NO: 378 - protein, 67 aa, Homo sapiens
  SITE (19): Xaa equals any of the naturally occurring L-amino acids
  SITE (36): Xaa equals any of the naturally occurring L-amino acids
VDLTYRVRIVKELHSYSKXSAKCQIAAYYSSRAPHXYVLFPSQESSSLTLYCSQDMFGLGPGEGHRK

SEQ ID NO: 379 - protein, 42 aa, Homo sapiens
  SITE (15): Xaa equals any of the naturally occurring L-amino acids
GTSPTPSHQSRLPGXLLGGGLKGPTIPGDHWHSFLSGVSLQW

SEQ ID NO: 380 - protein, 59 aa, Homo sapiens
  SITE (54): Xaa equals any of the naturally occurring L-amino acids
INHIPQLIPHYHGKALFCFIYLFSFIFILNLIPFSAMGNHSNVLCIILVYVYYXKMRDS

SEQ ID NO: 381 - protein, 80 aa, Homo sapiens
  SITE (49): Xaa equals any of the naturally occurring L-amino acids
PLPGPIPACRAASGALGGLHYSFCTGRPWVISGEFQQGGFCGHEPAAYXLPMLQFPLTHGNLLSWHVSVWVSFAFFATTV

SEQ ID NO: 382 - protein, 45 aa, Homo sapiens
  SITE (41): Xaa equals any of the naturally occurring L-amino acids
SQHFGRPRRVDHLRSGVPDQPDQHGETPSLLKKIQKLPGHXGWCL

SEQ ID NO: 383 - protein, 55 aa, Homo sapiens
  SITE (28): Xaa equals any of the naturally occurring L-amino acids
GEHQCCLLWGYQARCVTPGSQAASQAAXILPQPTTLASRPALRQEKRGQAEAEKG

SEQ ID NO: 384 - protein, 62 aa, Homo sapiens
YSLICSSASVYCLWNYMARTVLKQHVFPHYFRGEITFVLLLYNVYFQMETPYFFPKKRCSIY

SEQ ID NO: 385 - protein, 35 aa, Homo sapiens
  SITE (29): Xaa equals any of the naturally occurring L-amino acids
HEWWGSVQMWKWAWQRPDPFLCPRYCLEXSFVVND

SEQ ID NO: 386 - protein, 88 aa, Homo sapiens
  SITE (11): Xaa equals any of the naturally occurring L-amino acids
  SITE (12): Xaa equals any of the naturally occurring L-amino acids
LLGSLTLRTGXXPGWERRPGGPPRTRPTVGTNLTDIVAQRKITIRELGGCMGPIWSSYYGNCRSLLFVMDASGPHPALWHPVWQFFRS

SEQ ID NO: 387 - protein, 34 aa, Homo sapiens
  SITE (10): Xaa equals any of the naturally occurring L-amino acids
MHRSHYLKLXGIVNWCLHPPKVTKTSGWFLRHLT

SEQ ID NO: 388 - protein, 62 aa, Homo sapiens
KCKCIYLIEMKLILPNQERRGKVLKENIHTVEERKIKCKNDKIEVINKMVKINSNCHKSQQM

SEQ ID NO: 389 - protein, 112 aa, Homo sapiens
  SITE (98): Xaa equals any of the naturally occurring L-amino acids
  SITE (107): Xaa equals any of the naturally occurring L-amino acids
ASATSRKPLTASATLSRLVSGPHPRLVRPWDRITSQREEGQISRPATGRSRPPPCQPPRRPQDPSGLFNRKRKCVSAGSWATLVELPDSVLASRSSLXLPVTGPDSXSSKGL

SEQ ID NO: 390 - protein, 58 aa, Homo sapiens
  SITE (17): Xaa equals any of the naturally occurring L-amino acids
  SITE (25): Xaa equals any of the naturally occurring L-amino acids
KFRDSMNHLMCVLLYGXLSIIQNYXCSLIQQIFLEYLICVRSCSGCLGMFVKKIDQTF

SEQ ID NO: 391 - protein, 49 aa, Homo sapiens
  SITE (10): Xaa equals any of the naturally occurring L-amino acids
  SITE (37): Xaa equals any of the naturally occurring L-amino acids
  SITE (46): Xaa equals any of the naturally occurring L-amino acids
TRITRSGGDXESEAVISRDLKPPGLQLDSQLHHLGHXGNPVTGTTXCLG

SEQ ID NO: 392 - protein, 57 aa, Homo sapiens
GTAEAKEIWKQIKNLSKSGKSFVLLFCLCALLSFIQHVHMNILSEDLGFILRSAFNF

SEQ ID NO: 393 - protein, 83 aa, Homo sapiens
  SITE (56): Xaa equals any of the naturally occurring L-amino acids
NAATGSHRIRLPMLCNQQIKITCVIIRMSDVLLRTKLTLLILWQRVGKLGLFAKFXLPPIFRVFLKHSYTRIIHGCFPVTVSK

SEQ ID NO: 394 - protein, 115 aa, Homo sapiens
  SITE (42): Xaa equals any of the naturally occurring L-amino acids
  SITE (57): Xaa equals any of the naturally occurring L-amino acids
  SITE (110): Xaa equals any of the naturally occurring L-amino acids
  SITE (111): Xaa equals any of the naturally occurring L-amino acids
  SITE (115): Xaa equals any of the naturally occurring L-amino acids
GTCPRSEDGKAEIQTQIYQTSKPSNYPQNQAISTLFWGWGTXKLSGRLRGFRLPRGXALGFIHSPGAALGSALHRLCFSLGRGHRDTRCVLQEDPGPGGFPSMASMRYCXXGKMX

SEQ ID NO: 395 - protein, 37 aa, Homo sapiens
  SITE (35): Xaa equals any of the naturally occurring L-amino acids
VDPPAAGFGTRVHLTAADLSSQGNQTEVHTISRMXTS

SEQ ID NO: 396 - protein, 58 aa, Homo sapiens
HEVFRTQGWKEVVWVSPVPRDPVTLTHSNLVCMLHRSSGHTEAPPRPSGGGTVTREAP

SEQ ID NO: 397 - protein, 71 aa, Homo sapiens
  SITE (28): Xaa equals any of the naturally occurring L-amino acids
  SITE (29): Xaa equals any of the naturally occurring L-amino acids
FGTRSSVPPSPLMRPVWKVRGCGGGRAXXGSQASPTGLSRLGVGQLAMSLISGLGRLGRLQSWGFPEANCT

SEQ ID NO: 398 - protein, 58 aa, Homo sapiens
NFPTKKPRSRRKIGIRGIHSIEEEMKLSLFTDNTILYVEKSDIHKITARSDKFMKLAR

SEQ ID NO: 399 - protein, 81 aa, Homo sapiens
  SITE (30): Xaa equals any of the naturally occurring L-amino acids
GGGSMRKSILGRGNSVNSMLPGSGERGSSXAGGRPGKAEAREGGGPSRHEGSARPDGQWRNRAFNSELTRVWGSALFPSMP

SEQ ID NO: 400 - protein, 57 aa, Homo sapiens
FLVMLTLTGHGETLVKNRKKHKLSSSSRFFQFPIFQLITHEQLSSRNPILERLHFNN

SEQ ID NO: 401 - protein, 101 aa, Homo sapiens
  SITE (87): Xaa equals any of the naturally occurring L-amino acids
IRHRIQAAAVSGYVSTSVFCLLKKKNFPPNHTLPLHCLFDTKFQDPEKKPQSASSSSWGIQGTWWWSLYFPKLGVGSGADLGKVQPXGRLKNLWTLAGSLL

SEQ ID NO: 402 - protein, 34 aa, Homo sapiens
IRQRKILGLNFICNSWCDLIYINCPQETSISERR

SEQ ID NO: 403 - protein, 67 aa, Homo sapiens
RLRVKGRTHQKSKRRELKSKGGQSTKCEHTVYTRNAIIQVPITQLQGIIEICTYIKSTHTLYNLKNI

SEQ ID NO: 404 - protein, 32 aa, Homo sapiens
KATAWGVGKSEVDWLPRELQYSLKSFQFLELD

SEQ ID NO: 405 - protein, 102 aa, Homo sapiens
  SITE (37): Xaa equals any of the naturally occurring L-amino acids
IRHEENKTVSGLWCTFLKVLAVELRCESQQYFWQLCXSVYMLLRILVVTSGLCLPEITSLCSGKREHIPRAGPEKGKGRYRGMKKGLLEVSLLECYQEPCTS

SEQ ID NO: 406 - protein, 56 aa, Homo sapiens
  SITE (44): Xaa equals any of the naturally occurring L-amino acids
  SITE (56): Xaa equals any of the naturally occurring L-amino acids
VKLHTKGQEEKNMRKQTLFLLKFTNGRFTVGWNRTAGPFRNFTXLKNEFYYFAKLX

SEQ ID NO: 407 - protein, 39 aa, Homo sapiens
LYMHGLLFVKHTKTTIVFTMRKVLVEQNLMHFYICISSK

SEQ ID NO: 408 - protein, 41 aa, Homo sapiens
  SITE (14): Xaa equals any of the naturally occurring L-amino acids
FNWLFICLILQCGXMDDSVLQCLLSLLSCLNNLFLLLKVIF

SEQ ID NO: 409 - protein, 92 aa, Homo sapiens
  SITE (60): Xaa equals any of the naturally occurring L-amino acids
  SITE (61): Xaa equals any of the naturally occurring L-amino acids
  SITE (66): Xaa equals any of the naturally occurring L-amino acids
RGRGLGRKINGGSLSGLSPPPSSLRSCEILGGEGWPPRQQRAEGVPWSVRAGTGSARRSXXLPSGXWPAPHGEPRTLVPGHSGAAMLGPNHE

SEQ ID NO: 410 - protein, 30 aa, Homo sapiens
SSSCSKWKQYLGLLDCSRDIRFATLPFVGK

SEQ ID NO: 411 - protein, 43 aa, Homo sapiens
  SITE (34): Xaa equals any of the naturally occurring L-amino acids
LVHCSTVTTSRVENVVQMHVLILVRSCGHKGHQXQSSSFLPRP

SEQ ID NO: 412 - protein, 51 aa, Homo sapiens
QLPLPHLSQEPCFSLGYDNGLAHFLAFPPHSSLENAVTLRPLGQLILHPLT

SEQ ID NO: 413 - protein, 66 aa, Homo sapiens
IQTLNSTNSKHPYECKHPCTYVLIYPIPPPYTLIGRKTLILYSLGLGVVGHACNPSALGGRGGWIT

SEQ ID NO: 414 - protein, 52 aa, Homo sapiens
  SITE (37): Xaa equals any of the naturally occurring L-amino acids
  SITE (38): Xaa equals any of the naturally occurring L-amino acids
  SITE (39): Xaa equals any of the naturally occurring L-amino acids
FQPQCQVCAEWKREILRHHVNRNGDVHWGNCRPGRWXXXAWEVAKSWKRLRS

SEQ ID NO: 415 - protein, 75 aa, Homo sapiens
NSARGKDQLGGGGPLTKRAGAEDVRIAEDWPWCHAGCGVPARGWDGGERLVSSRAGGRWFPFRLHHLSIQPLSTP

SEQ ID NO: 416 - protein, 66 aa, Homo sapiens
FGTSYRHVHHTRLIFFEFLVETRSHYVAQAGLELLSLSNPPASASQSAGIMGVTPRLAIFFLLKAE

SEQ ID NO: 417 - protein, 38 aa, Homo sapiens
  SITE (37): Xaa equals any of the naturally occurring L-amino acids
SVASSTQNEHSNYNRSILVFINVLFLKKNTIEIIGCXY

SEQ ID NO: 418 - protein, 44 aa, Homo sapiens
PRMQISSDFYFFSVSEVTEQGKYQHLQRRSHKGCSLKVEDVQNL

SEQ ID NO: 419 - protein, 91 aa, Homo sapiens
  SITE (89): Xaa equals any of the naturally occurring L-amino acids
PAWIIFSGCGISRHLPVVWGTWFGCRVRRWKNELYLVKQLKPFLSRICKSIIEFVSPPWIPVGPTAQQVCRFLLKFLFPPSLCLSKRKXSI

SEQ ID NO: 420 - protein, 224 aa, Homo sapiens
  SITE (28): Xaa equals any of the naturally occurring L-amino acids
  SITE (223): Xaa equals any of the naturally occurring L-amino acids
QLLDGSGAAGQEELEEDDAFISVQVPAXAFLGSGTPGSGSGSRGRLNSFTQGILPIAFSRPTSQNYCSLEQPGQGGSTSAFEQLQRSRRRLISQRSSLETLEDIEENAPLRRCRTLSGSPRPKNFKKIHFIKNMRQHDTRNGRIVLISGRRSFCSIFSVLPYRDSTQVGDLKLDGGRQSTGAVSLKEIIGLEGVELGADGKTVSYTQFLLPTNAFGARRNTIXS

SEQ ID NO: 421 - protein, 72 aa, Homo sapiens
IRQSKLFEFCSFLKIFFSLSLSDWVNSKALSSSSAVLSSTCLSLLLNCFIHILFYSFNFFKLVFTFLCYLLQ

SEQ ID NO: 422 - protein, 85 aa, Homo sapiens
  SITE (21): Xaa equals any of the naturally occurring L-amino acids
  SITE (55): Xaa equals any of the naturally occurring L-amino acids
  SITE (70): Xaa equals any of the naturally occurring L-amino acids
RLRRWHHLPGVPTWFLTSDLXPCSTFRSYPLLFPGPPIPASVPWMRQTSSLPLGXPGFLSCTSGFILWMXIPGSSQPRAGALGGP

SEQ ID NO: 423 - protein, 43 aa, Homo sapiens
  SITE (17): Xaa equals any of the naturally occurring L-amino acids
RTSLEFFFLFVFQTLDXMPLLNQVPEEKLHQINDTLGEISNGK

SEQ ID NO: 424 - protein, 37 aa, Homo sapiens
SFQTLLGVQFRSIKCSPVVFQEVRDDFCLTKVKANTH

SEQ ID NO: 425 - protein, 43 aa, Homo sapiens
  SITE (14): Xaa equals any of the naturally occurring L-amino acids
RGSVTRTLGVEGNXEPLNLFPWTLSLLFPHNFGPPTMVWPPFL

SEQ ID NO: 426 - protein, 46 aa, Homo sapiens
  SITE (23): Xaa equals any of the naturally occurring L-amino acids
  SITE (36): Xaa equals any of the naturally occurring L-amino acids
  SITE (41): Xaa equals any of the naturally occurring L-amino acids
  SITE (44): Xaa equals any of the naturally occurring L-amino acids
LTINCSRLFTLHSPKEDKAQPGXSVVLIPYPFLSDXAYIIXNMXKA

SEQ ID NO: 427 - protein, 87 aa, Homo sapiens
DLPGVDPSRGHSHVRVGCGLRFGRPGTTHDLGLPWLIGLQAPRSPLLAHPERLCSDPPLSLLKTDPKGVFVLPPRGVQDLHVGVRPL

SEQ ID NO: 428 - protein, 46 aa, Homo sapiens
HNLLSFPGPAIASSVQPHFLQSQHLSFPLQAVSCFYGIVFAQTRPI

SEQ ID NO: 429 - protein, 63 aa, Homo sapiens
QCLETCLIVITWRVWGGGALGIQYAEARGAAKCPTMHRTAPQQCFTPNISAQLRNPDLDGQGA

SEQ ID NO: 430 - protein, 80 aa, Homo sapiens
PPPPPICPAHFLKLPPFSSSNQRSLRTMVMDENNSTAATLTPWPGTVLNALGTVFKIEQVFGQLFNPHNSLGSRLIFIPI

SEQ ID NO: 431 - protein, 49 aa, Homo sapiens
  SITE (48): Xaa equals any of the naturally occurring L-amino acids
LAKYPWLRSFDFQNVLILSILTSNKYTLLSNSGPFGFVLNHLLLTFMXY

SEQ ID NO: 432 - protein, 69 aa, Homo sapiens
LGVGEGPARPLNPCSLRRYPQPSLNEYSLTLWIPYHVLHVYHRTSFSKRPFKVGISIPLWRRGKGGSNN

SEQ ID NO: 433 - protein, 82 aa, Homo sapiens
  SITE (11): Xaa equals any of the naturally occurring L-amino acids
  SITE (33): Xaa equals any of the naturally occurring L-amino acids
VGGGAPQRSGXTCSCLRFALRDKESPDPWEAWXGCEGVISGPLEISGKMGVLRGLESWGFTGVGVHDANSLYFWEPSPGEIF

SEQ ID NO: 434 - protein, 56 aa, Homo sapiens
  SITE (15): Xaa equals any of the naturally occurring L-amino acids
NSAQVAYIGDWNYIXAGQCSGLNNGPKDFQVLLPGNREFYFTRQKELCRYSQGYGS

SEQ ID NO: 435 - protein, 82 aa, Homo sapiens
  SITE (52): Xaa equals any of the naturally occurring L-amino acids
IRQRLEQPCKLIQVPGPMPKRPDVGKDKFGWKGVITEPCPAPRIPQASDTFXLLATHASNENTCQFGQQKESRPDVFMSPQI

SEQ ID NO: 436 - protein, 42 aa, Homo sapiens
  SITE (17): Xaa equals any of the naturally occurring L-amino acids
  SITE (20): Xaa equals any of the naturally occurring L-amino acids
DHTLKHEGKICKQISKXSLXWSECTISYCWGHVISKFGRPLV

SEQ ID NO: 437 - protein, 89 aa, Homo sapiens
FGTRNAQLSQAWWWAPVIPTTREAGLGELLEPRRWRLQQAEIAPLHSRLGNKSKTLSQKQQQQQTSGAANQKTQNKTGKAQSCFPPSAH

SEQ ID NO: 438 - protein, 69 aa, Homo sapiens
  SITE (14): Xaa equals any of the naturally occurring L-amino acids
NSARAGGGADTRPXADPAPAPAGVPGPLPTARGFPSLRKFILVPSGGFLSSSTHSGLTRSLAFSVRFGR

SEQ ID NO: 439 - protein, 37 aa, Homo sapiens
REPRRRHSINRSCHCRCIVLVINLPGSQQLFFIDLTI

SEQ ID NO: 440 - protein, 61 aa, Homo sapiens
ALPNLQITELFFSRNICKFLSWTLWEWLYIGRTNVFPCIIVHDNFCLIAHKKSIYILKNMR

SEQ ID NO: 441 - protein, 67 aa, Homo sapiens
TFSLIDALSFCHSLFENIRLQGLKQVSAIFCSTSWVQKRHRNMPQHLDPILSENFVLSSVFWSASLK

SEQ ID NO: 442 - protein, 58 aa, Homo sapiens
  SITE (42): Xaa equals any of the naturally occurring L-amino acids
  SITE (48): Xaa equals any of the naturally occurring L-amino acids
  SITE (53): Xaa equals any of the naturally occurring L-amino acids
  SITE (55): Xaa equals any of the naturally occurring L-amino acids
  SITE (56): Xaa equals any of the naturally occurring L-amino acids
  SITE (58): Xaa equals any of the naturally occurring L-amino acids
VVAIYFILGSRLLHGQVAKSAPLNQTGTDHGPSSHAAAGRLXSTSLGXDADLXFXXWX

SEQ ID NO: 443 - protein, 75 aa, Homo sapiens
  SITE (48): Xaa equals any of the naturally occurring L-amino acids
  SITE (74): Xaa equals any of the naturally occurring L-amino acids
  SITE (75): Xaa equals any of the naturally occurring L-amino acids
ISCYMLVFVLPSPNKYGGDLDVSIEYQEYLAGWVAHTCNPNNLGGRGXADHLRSGVLREAWPTWVNPRLLLKNXX

SEQ ID NO: 444 - protein, 43 aa, Homo sapiens
  SITE (23): Xaa equals any of the naturally occurring L-amino acids
  SITE (35): Xaa equals any of the naturally occurring L-amino acids
  SITE (38): Xaa equals any of the naturally occurring L-amino acids
HHPKSLREKRDLSCGPPLSIHWXVGSGCELYSETXQRXIGCDK

SEQ ID NO: 445 - protein, 62 aa, Homo sapiens
  SITE (29): Xaa equals any of the naturally occurring L-amino acids
  SITE (41): Xaa equals any of the naturally occurring L-amino acids
RDSTSPAVQLVRRGSQSSRICSGVASFNXAHLWCSLQLCLXSLQCSLEVFFLLNRFYSLCSS

SEQ ID NO: 446 - protein, 37 aa, Homo sapiens
ILFYMATYLPQYFFLKSSENKIKYHFLFTCLFYVVLG

SEQ ID NO: 447 - protein, 83 aa, Homo sapiens
  SITE (12): Xaa equals any of the naturally occurring L-amino acids
LFSLKAFTHARXVTWNVLSITPAVMPSTELDGRPLHGSLKRSHPSNWVWPQAHWLMLTCAACGYSYANCGFTSLKQKGTVSRG

SEQ ID NO: 448 - protein, 94 aa, Homo sapiens
  SITE (59): Xaa equals any of the naturally occurring L-amino acids
  SITE (83): Xaa equals any of the naturally occurring L-amino acids
FGRVPVRSGMGDRARLLKKKKGNATWFPSVSSPPPSLPLWKAELRPSVMETTSSTLLLXRSLRGKAAPASSPAWHHPLPVPPXSGEWGLPAVGS

SEQ ID NO: 449 - protein, 35 aa, Homo sapiens
IYYGYVCRNGYRKQTEKQTLMGQKKQERVVHIQGR

SEQ ID NO: 450 - protein, 74 aa, Homo sapiens
SLQPVRVTLSPRFPIWCYTKERLTVTFLFFPLHTQIFYNCGILTNPLCFTLGGETEAICFLSRLHFTGIIPRVQ

SEQ ID NO: 451 - protein, 64 aa, Homo sapiens
  SITE (25): Xaa equals any of the naturally occurring L-amino acids
  SITE (26): Xaa equals any of the naturally occurring L-amino acids
FGRALLFQGGEELADLANFGFCPLXXVTFHFSPNKIKIFFFLDQRILGDFYQWLGKEGGKEDWL

SEQ ID NO: 452 - protein, 76 aa, Homo sapiens
  SITE (50): Xaa equals any of the naturally occurring L-amino acids
  SITE (51): Xaa equals any of the naturally occurring L-amino acids
SGPCVYRPRFFSVSFITSSVYRSLAGGGMRLPRGTQVSLHLALYPVSFAXXMCSDALPLGASKLQCPLPPGRGDRQ

SEQ ID NO: 453 - protein, 48 aa, Homo sapiens
  SITE (30): Xaa equals any of the naturally occurring L-amino acids
STNKNKTGIKSGTASFISYSSYRIEFASRXSSCLRWQNDDVMNEQHLQ

SEQ ID NO: 454 - protein, 61 aa, Homo sapiens
  SITE (52): Xaa equals any of the naturally occurring L-amino acids
  SITE (59): Xaa equals any of the naturally occurring L-amino acids
LHGKFSFFFFEMESYSCCPGWNARRDLGSLQPLQYPGFKQDSPASASQVAGXCRCLPPXLT

SEQ ID NO: 455 - protein, 56 aa, Homo sapiens
ARVEVRVPGRVPRIGFRVYSSHGGSEWAELGLESGIRIVVLSPRYWDGSWESMLWF

SEQ ID NO: 456 - protein, 30 aa, Homo sapiens
NKTEICCIHFRIYLSSLYIHIYVVSLRRRI

SEQ ID NO: 457 - protein, 35 aa, Homo sapiens
LAIWQLGHKELTRGVWHEYRPFKVKDRKKHKIRVG

SEQ ID NO: 458 - protein, 90 aa, Homo sapiens
EFSTRWPHPVSQLSLPTLRSPAWAATLNRRPHIQPLLTHPLGVEFDAGQCSHIGILHFSLFKSLLQGFLILPGPRSVLFLSYSSLSKTSG

SEQ ID NO: 459 - protein, 42 aa, Homo sapiens
FGRAQNSRQYCCLFYKLDVRRRLIYNSTNSQIRHPFFPLAGI

SEQ ID NO: 460 - protein, 91 aa, Homo sapiens
  SITE (46): Xaa equals any of the naturally occurring L-amino acids
  SITE (80): Xaa equals any of the naturally occurring L-amino acids
EKTLFRKSQLGESRHTGLGVLTLGHRFQAFRLEGGVLPGTRTCLPXNFSASYCCHWQHAETLSLTRSTKKKSPAWWRAPXVLAAWDAEFRG

SEQ ID NO: 461 - protein, 144 aa, Homo sapiens
  SITE (25): Xaa equals any of the naturally occurring L-amino acids
TLGDTIEGTPAGTGPEFPGRPTRPXTVTPPGLAREDWKIIRALSEIAGMTLPYDTLDQVRNRLEEVSPNLVRYDDIEGANYFQQANELSKLVNQQLLADPLVPPQLTIKDFYMTDSISRASQTMAKCVKAVTEGAQAVEEPSIC

SEQ ID NO: 462 - protein, 55 aa, Homo sapiens
  SITE (10): Xaa equals any of the naturally occurring L-amino acids
LFSSISTATXLAISVLPFIVEFLKNFLYLLSAVLLLLSSLLQSNIPPIFHQNCPC

SEQ ID NO: 463 - protein, 71 aa, Homo sapiens
  SITE (42): Xaa equals any of the naturally occurring L-amino acids
  SITE (43): Xaa equals any of the naturally occurring L-amino acids
PQVYPCPQPTIFQMHTMIITGSMVGLMWQSTWKHRFCQRSSXXDVVSPSLWAVIHVASYLCCFAVRCMGLS

SEQ ID NO: 464 - protein, 70 aa, Homo sapiens
RGSGITIRTVWPGAVAYACNPSTLGGQGGWITRSRDRDYPGQHGETPSLLKIQKLVRCGGGHLYPSYWGS

SEQ ID NO: 465 - protein, 62 aa, Homo sapiens
  SITE (48): Xaa equals any of the naturally occurring L-amino acids
LNNCAYIYIYLHVVIKNCVTLLHANMKTVLQYINLKKKKKKKRAAALXDPSRGPSLRVHATS

SEQ ID NO: 466 - protein, 67 aa, Homo sapiens
SNTFCVRSCVAPGLTESWSERHPDPLQVRRKTEDVKTTPPFLQQSAHRSVNIVLWIRGFCRRCWCSG

SEQ ID NO: 467 - protein, 65 aa, Homo sapiens
TGSYLLELGFELQVFFWLQTLESFLVLSGILPALPHSAFLFPVTFLRCISWFQFSSCCCPSFHHS

SEQ ID NO: 468 - protein, 68 aa, Homo sapiens
GDLPTSASQNSGTAGMSHHAQPKEVFKKSFLIRKCGTLFWSFRCLEHSLPNHLDRKIINLYFNKHFSS

SEQ ID NO: 469 - protein, 85 aa, Homo sapiens
NKAILPFKIELLCSLMITIEQTNLYSNISQQKFFKRFKSLLPYIYFIAFLGLGSKAPEEACVNPCIIAGCKSLASQEVTNFKLSI

SEQ ID NO: 470 - protein, 56 aa, Homo sapiens
  SITE (52): Xaa equals any of the naturally occurring L-amino acids
WRAKYSKEFLILTTGADPPPTLHPSCHPCDSSSRFASAAQELTPSEVMAYIXFAFD

SEQ ID NO: 471 - protein, 65 aa, Homo sapiens
RLKTGLKMNNTNWVMTLEPNTLVLFREVVDIQITEPRSKAKYKGTLKNIYNEVNTLTEFKTGTKY

SEQ ID NO: 472 - protein, 89 aa, Homo sapiens
LKSREGQGSPRLLCGDSFTSLLCILRYCKRTREKWRMNPGENKVVRRFRHVASLRVSRVLINSRTGGGDILDAAVKATEPRKAETPPCL

SEQ ID NO: 473 - protein, 55 aa, Homo sapiens
CGVHFHLLLNQLKFLSESFPRVEKYLSSSTYYSLVLRDKNHVRVYNVMEHKTFKL

SEQ ID NO: 474 - protein, 55 aa, Homo sapiens
SFSQQLHSFQKLRYIPYEYQHCDICVANYFLWNHSFNFTSCCLGRLCREHIFNRL

SEQ ID NO: 475 - protein, 37 aa, Homo sapiens
  SITE (27): Xaa equals any of the naturally occurring L-amino acids
DLGDHLNQNPEWNSIQGRLWGQFPQMXHCFSSVGTHL

SEQ ID NO: 476 - protein, 224 aa, Homo sapiens
  SITE (134): Xaa equals any of the naturally occurring L-amino acids
  SITE (184): Xaa equals any of the naturally occurring L-amino acids
  SITE (185): Xaa equals any of the naturally occurring L-amino acids
  SITE (190): Xaa equals any of the naturally occurring L-amino acids
  SITE (195): Xaa equals any of the naturally occurring L-amino acids
  SITE (202): Xaa equals any of the naturally occurring L-amino acids
  SITE (217): Xaa equals any of the naturally occurring L-amino acids
SGETHPVDAQGDGGVHQALGEGVKALCPEAAVAAVREPPTVWHRFGEQSMHIAGHVRVMGPYLQQVKTELVLLIWEQLRKCCDSFNLLSFAESLQSWQDTLVETTDAACHEAMQWVTHLQAQGSTSILQALLKXFSFHDLEGLYLLTDGKPDTSCSLVLNEVQKLREKRDVKVHTISLNCSDRXXVEFLXKLASXTGGRYHXPVGEDTLSKIHSLLXKGFINEK

SEQ ID NO: 477 - protein, 54 aa, Homo sapiens
KFKRQSLQLSLISTEIKMIPPVTVLSDNSECKCAFWHKLSCPNSLDYNYKIMGF

SEQ ID NO: 478 - protein, 41 aa, Homo sapiens
KSKLGGKCHLSLYHTFKYTVINITRKEQNLCEENCEIFIKG

SEQ ID NO: 479 - protein, 73 aa, Homo sapiens
  SITE (30): Xaa equals any of the naturally occurring L-amino acids
  SITE (70): Xaa equals any of the naturally occurring L-amino acids
AVTRESRPLPSCNDAIWSMWLPGEQWLRPXSWLLTATVQSCTQHFCSIVHQPGASHVATFAARIQEGRVXEIL

SEQ ID NO: 480 - protein, 51 aa, Homo sapiens
  SITE (23): Xaa equals any of the naturally occurring L-amino acids
  SITE (36): Xaa equals any of the naturally occurring L-amino acids
IFSNLLCKICYIRSALNYFCAIXNIHSCADFEPLDXFFFKESISAMFFDPF

SEQ ID NO: 481 - protein, 71 aa, Homo sapiens
  SITE (43): Xaa equals any of the naturally occurring L-amino acids
  SITE (64): Xaa equals any of the naturally occurring L-amino acids
GKSTRLCITCSRPTRSKGGKVYTWGRKFPSISGGFPGKNRAVXHSYPLFSSLILPSSCGGTGLXTPKRGSG

SEQ ID NO: 482 - protein, 67 aa, Homo sapiens
GRVLAVTLPRALPFLGLNLPSPKTGVWRVSAHSHHRQIPRAGKVSGEGFCNKPLSCFSNDKFDLLKL

SEQ ID NO: 483 - protein, 58 aa, Homo sapiens
  SITE (13): Xaa equals any of the naturally occurring L-amino acids
FSEESLRLCMILXYSSGFRCAKSTSSHTGTLKQHRCTREFWVFYTENTAHISLVILML

SEQ ID NO: 484 - protein, 42 aa, Homo sapiens
KHINSPGKVNLIPLRRIQLPLQTTVNFLDWVLGLILFKKLRS

SEQ ID NO: 485 - protein, 76 aa, Homo sapiens
  SITE (47): Xaa equals any of the naturally occurring L-amino acids
  SITE (54): Xaa equals any of the naturally occurring L-amino acids
  SITE (62): Xaa equals any of the naturally occurring L-amino acids
  SITE (63): Xaa equals any of the naturally occurring L-amino acids
  SITE (69): Xaa equals any of the naturally occurring L-amino acids
  SITE (75): Xaa equals any of the naturally occurring L-amino acids
  SITE (76): Xaa equals any of the naturally occurring L-amino acids
DVAVFCFEAGTMIGQACHLVKCSPSENVFLGLCLQLGATNSELDSKXFMNALMXAVAAALCXXGMWMQXLTFWSXX

SEQ ID NO: 486 - protein, 120 aa, Homo sapiens
  SITE (16): Xaa equals any of the naturally occurring L-amino acids
  SITE (52): Xaa equals any of the naturally occurring L-amino acids
RGECSSGIKNIGHVCXVTYLPSRLSSTRAETLVQGLAHSGCSINITYVKEPXPAAQVFYAKTWVSFILVVLPRYNVYIIGKLAKVTMKVTPPNQSMSSWLLCLSFDDSTVMSIVITEKSN

SEQ ID NO: 487 - protein, 56 aa, Homo sapiens
  SITE (32): Xaa equals any of the naturally occurring L-amino acids
GNLLIFVALEERTKGAISLPSPPFREEGWVSXVFPMDLFLPCPGLCTTLVLKAVEK

SEQ ID NO: 488 - protein, 54 aa, Homo sapiens
  SITE (10): Xaa equals any of the naturally occurring L-amino acids
SIPKIIGLRXGDRCSPPGHLLGHPGTSSWQFASLGPRASCKWSLRSWSHSLGRC

SEQ ID NO: 489 - protein, 69 aa, Homo sapiens
FNLQMKEAGLEKCCFLHSDPNGESTRHQGSINSNKHHCLRSTGLLSSLLSGMPPAALLSECELLKVKGI

SEQ ID NO: 490 - protein, 59 aa, Homo sapiens
HEVAGLAVKTLHSLVPQDFPKLISFHHGRHGLGKIKSLNPRPHRYQVADHTAKPSDPDI

SEQ ID NO: 491 - protein, 37 aa, Homo sapiens
ENNIAIIFSPSFEFFLAKHFQCVKYLSFLQRDKYTNS

SEQ ID NO: 492 - protein, 42 aa, Homo sapiens
NNTTIKCVVNNIGVLPLRVIESNGKNRNYFCTQCINDYLLPS

SEQ ID NO: 493 - protein, 89 aa, Homo sapiens
  SITE (6): Xaa equals any of the naturally occurring L-amino acids
  SITE (7): Xaa equals any of the naturally occurring L-amino acids
  SITE (35): Xaa equals any of the naturally occurring L-amino acids
  SITE (71): Xaa equals any of the naturally occurring L-amino acids
  SITE (72): Xaa equals any of the naturally occurring L-amino acids
DIFPLXXLSTKFQSAYIMGEGGTLSLFKIKSPKPXEGARPTGLSSSLKQMVSNHGSALWKRPSVLGQTPSXXAISLNRFTTILLKALWD

SEQ ID NO: 494 - protein, 87 aa, Homo sapiens
SSSWQQSHHFPCPSASSVFMMSFLAFLIKRQNLFSPSHESELVLWLSLVNRMLWEGWFTSFELGLRRSRACLLSLRTAAPTLQKSLG

SEQ ID NO: 495 - protein, 17 aa, Homo sapiens
ILKKKKKKSFLLFENTS

SEQ ID NO: 496 - protein, 43 aa, Homo sapiens
  SITE (17): Xaa equals any of the naturally occurring L-amino acids
FNQFINLHNLFLYAFNXYLCHIRKINNVISCSYWFSKMPVSSC

SEQ ID NO: 497 - protein, 47 aa, Homo sapiens
LLFSSFNCLNFSFRISSSLLYRPHLSCSLLFSFSQLVRFLSNISSSA

SEQ ID NO: 498 - protein, 53 aa, Homo sapiens
  SITE (21): Xaa equals any of the naturally occurring L-amino acids
  SITE (42): Xaa equals any of the naturally occurring L-amino acids
  SITE (48): Xaa equals any of the naturally occurring L-amino acids
NVFYYEFHFFFMFNSHLWGLXAWLMPVVPALWEAGAGGSLGXQGFQNXLGQHG

SEQ ID NO: 499 - protein, 106 aa, Homo sapiens
  SITE (14): Xaa equals any of the naturally occurring L-amino acids
  SITE (23): Xaa equals any of the naturally occurring L-amino acids
SHLPKRSERFKDTXLQARGSSHXKLTDQHIPFETPPSAHHSRTHFCLENSFLLLLHVMAYLTLKEYYWGKNYKCCTYAEKLQSIILPPKNLFENHFQTTSYFLCSF

SEQ ID NO: 500 - protein, 76 aa, Homo sapiens
QDPSHSWENTHLSYSRPIGVSPVTKLLDSASIFDSKSGQRELKYLEEKEFSLRYVLSLSQSLAVYSFFLFILFSSA

SEQ ID NO: 501 - protein, 60 aa, Homo sapiens
  SITE (22): Xaa equals any of the naturally occurring L-amino acids
IFKVFSSDGHLIYIFEGSFWLXGGKLAVWGQEQKQRLVKRLLEVEGREVMTSWTQVRQVD

SEQ ID NO: 502 - protein, 46 aa, Homo sapiens
KLETKFGQNERQSHGYVKTHILGSSGWYTDSGIDSDTVLLVLISNS

SEQ ID NO: 503 - protein, 85 aa, Homo sapiens
  SITE (35): Xaa equals any of the naturally occurring L-amino acids
DFPTRQARSAGALTPLEWPSNYSFEKPRILFTGRXPGGADSLKVAIESAHRPFRMGRPYTAVRRRGRTTNFRFRARMQHKWEGTV

SEQ ID NO: 504 - protein, 69 aa, Homo sapiens
  SITE (10): Xaa equals any of the naturally occurring L-amino acids
  SITE (36): Xaa equals any of the naturally occurring L-amino acids
  SITE (63): Xaa equals any of the naturally occurring L-amino acids
NPCFISAWRXQLQPRGHYQASETNSSLLFRKKITTXNFRNCNLLQMDFGHPNYPSLNILISHXEINITC

SEQ ID NO: 505 - protein, 121 aa, Homo sapiens
  SITE (18): Xaa equals any of the naturally occurring L-amino acids
  SITE (64): Xaa equals any of the naturally occurring L-amino acids
LGEGPSTAGSQELWQCAXPDTQEASPQAGGTPPPGFLGSSTSDHSPCLPSSKEQALLVFPGSPXVRPTPGPFPMAACPAAQGSPPCTVLPAQSLWIAGPKALGRVRGHCRPEPPFFHGVRP

SEQ ID NO: 506 - protein, 76 aa, Homo sapiens
NCFSILYSCLFQEDFLDLTVAVKNVSGLEDALWNMYVEEEVFDCDNLYHCGTCDRLVKAAKVKTDNCFFPGSPLCS

SEQ ID NO: 507 - protein, 47 aa, Homo sapiens
EMTRIYPLHLSPIPVSRNTLAWKVECAPNQPLQMGDCLGAYGSLLLF

SEQ ID NO: 508 - protein, 79 aa, Homo sapiens
  SITE (50): Xaa equals any of the naturally occurring L-amino acids
AEPRTSRSHPSTRGDSQATRKEPCTEVRTRGQSAEAVHQIQEITAGVSEXQHSHGLDDMQLHQLALHPAPTSLSHTFHR

SEQ ID NO: 509 - protein, 46 aa, Homo sapiens
SCSWRRKQRFSKLPRVTQGIGGRAKSNAQISKLGVLTLHQCYLCHM

SEQ ID NO: 510 - protein, 107 aa, Homo sapiens
RWSFTLVAQAGVQWHNLGSLQPPPPGFKQFSCLSFPSSWDYRHAPTCLANFCIFSRNGVSPRWPGWSWNSWTSGGSTHLGPPKVLGFTGVTTRTRPLCTFYKENFFS

SEQ ID NO: 511 - protein, 64 aa, Homo sapiens
  SITE (21): Xaa equals any of the naturally occurring L-amino acids
PPPPHVLLMAIKTVHTTFLFXYILSYSPLTPLEQGLTASFPRHIPRAECCLWAHSRCFIKYCWK

SEQ ID NO: 512 - protein, 99 aa, Homo sapiens
  SITE (55): Xaa equals any of the naturally occurring L-amino acids
  SITE (98): Xaa equals any of the naturally occurring L-amino acids
THMWSCSLNYILKEPIFKYSHILRSLGLGLQHEILGQHNSSPVRPHPQDLQNSCXSHMHNPFTSSQQPPNSQPVSASTVVPKSHLKYQHLNQVWVRLXV

SEQ ID NO: 513 - protein, 89 aa, Homo sapiens
  SITE (59): Xaa equals any of the naturally occurring L-amino acids
SSCLSFPKCQVYRCETEPDSTCLHFNAHKTILHFMNYIHVRKILVNKDGKTSTPTSENXQLPLGRKKGPGKRYKGGLNYNYKTTFFFCF

SEQ ID NO: 514 - protein, 25 aa, Homo sapiens
TWYRLIHQSFGHLQQGRPVWRGGSK

SEQ ID NO: 515 - protein, 58 aa, Homo sapiens
  SITE (2): Xaa equals any of the naturally occurring L-amino acids
KXATAFLNLEPDRCYQVWVMAVNFTGCSLPSERAIFRTGKEMDAKGALEDNAQFFTDS

SEQ ID NO: 516 - protein, 72 aa, Homo sapiens
  SITE (7): Xaa equals any of the naturally occurring L-amino acids
  SITE (10): Xaa equals any of the naturally occurring L-amino acids
  SITE (58): Xaa equals any of the naturally occurring L-amino acids
VMPYVNXGFXPRPIRGRILSRTSQNQDSAQEPIRGISPMAYMQMKVPEWTKTRHSHSXHRGGEVRRGMGLWL

SEQ ID NO: 517 - protein, 33 aa, Homo sapiens
AETNSVMFVIYIIWRVVTYIAVYPDFNLTMCTC

SEQ ID NO: 518 - protein, 93 aa, Homo sapiens
IRPRVTVEWCSTLIPASLLPLPGEDDSTHSCCEILNQIYARWEDLKDQPLDNLVKIWFSDGSSFVQNETIYAGYTEAKALSLGTSGQLAKLIF

SEQ ID NO: 519 - protein, 107 aa, Homo sapiens
LCHGSACAAEPCTVNSAKLVSSCQVPWACHQGSLNLRLPDPWQEQIPVLLTQYICSKLFNLRAILNLKIRVFLLQNYFYGPFNEDPMANAQLFRITFYRFHIENSKC

SEQ ID NO: 520 - protein, 54 aa, Homo sapiens
  SITE (3): Xaa equals any of the naturally occurring L-amino acids
EKXWGNLVFLRLTWPWNLFSLGISYRTLLFAKPNLGQCWFRFRLIWMFCNETTL

SEQ ID NO: 521 - protein, 60 aa, Homo sapiens
  SITE (13): Xaa equals any of the naturally occurring L-amino acids
MPAHIVKLCQIFXPREATSTLLPQSDLLFTIIEEAYVVLLGTDSSRKLCIPWAFSYQPLF

SEQ ID NO: 522 - protein, 135 aa, Homo sapiens
  SITE (117): Xaa equals any of the naturally occurring L-amino acids
  SITE (127): Xaa equals any of the naturally occurring L-amino acids
  SITE (135): Xaa equals any of the naturally occurring L-amino acids
RPVNRFLSPSVALSQLLRKRHIGNDIVTIIFQEPGALPFTPKNIRSHFQHVFIIVRVHNPCTDNVCYSMAVTRSKDAPPFGPPIPSGTTFRKSDVFRGLLAGQGDLTLEERRGTSSXQVSHHGPPGXRRGLFSRX

SEQ ID NO: 523 - protein, 65 aa, Homo sapiens
  SITE (17): Xaa equals any of the naturally occurring L-amino acids
PPTSASRSAGITGVTLXPSRFSFLRWTPSVVLKCYLVFLSTKITLQRKYVLDKLCSGMSYSVVGP

SEQ ID NO: 524 - protein, 76 aa, Homo sapiens
  SITE (4): Xaa equals any of the naturally occurring L-amino acids
  SITE (15): Xaa equals any of the naturally occurring L-amino acids
  SITE (28): Xaa equals any of the naturally occurring L-amino acids
  SITE (65): Xaa equals any of the naturally occurring L-amino acids
RTTXFWQDTLPCLPXIITWLRTCTLASXCPIAALGDEKGFTALGQCSTTGKAFGPQTRYLLYPKXLCLFQLGIRVS

SEQ ID NO: 525 - protein, 56 aa, Homo sapiens
MWRKSSQTQIYSWKGEAYFNSIFRKLWIVFGYHTTIWIYESFLKASCNVKSEIILM

SEQ ID NO: 526 - protein, 49 aa, Homo sapiens
IKAIIIIIIKEAELSLEPGLLPLCAILGDDLQFRGGGRDKHRGREAAPH

SEQ ID NO: 527 - protein, 167 aa, Homo sapiens
  SITE (5): Xaa equals any of the naturally occurring L-amino acids
  SITE (9): Xaa equals any of the naturally occurring L-amino acids
  SITE (12): Xaa equals any of the naturally occurring L-amino acids
  SITE (16): Xaa equals any of the naturally occurring L-amino acids
LTPVXRLGXLTXRHWXSHRAAAWDPFPCTCAWETAWETLRILALFRPPPGRPPDWWGCYRCTQQPPPSSGSSSVQRKWLSLPTLLPGGQDLLGLGTAGADMPRLGCSVLAPRGESHVCRHQLWQGSWAAGFQKTKNIPAPSPGHSTRKDLPKSKCPPCGPCCVLMSL

SEQ ID NO: 528 - protein, 107 aa, Homo sapiens
QVKRIVNKEENIDITLGSTLMNIFSNILSSSDSDLLESSSEALKTIDELAFKIDLNSTSHVNITTRNLALSVSSLLPGTNAISNFSIGLPSNNESYFQVMSQWFLSF

SEQ ID NO: 529 - protein, 110 aa, Homo sapiens
CWRTTGTCFLSMRITSLQKMVTTLVHLYIFPYISVGFTSKGLSPKENNKEELYHLVILERKESHGINNFDLKEVWENMPKFDSLWDYDVNNYKGMPLTCNKNLTHRKDQQ

SEQ ID NO: 530 - protein, 53 aa, Homo sapiens
FSKGLSWILSLILQHPQIQKKSQYIKYLCCDDVRTLHQWVNGIRIAKACLLLI

SEQ ID NO: 531 - protein, 71 aa, Homo sapiens
  SITE (67): Xaa equals any of the naturally occurring L-amino acids
  SITE (69): Xaa equals any of the naturally occurring L-amino acids
YESIHSCQKFLGVDLETLGLNQVTAVYIRLGTKNTWAFVLSQIYYMHICWEFHTEGHLKVFNRWMGXFXTA

SEQ ID NO: 532 - protein, 60 aa, Homo sapiens
DTEAQGFLEVAWPQVLGRGGAGLAKRSGSFPAGRGNAAVCSAMVLEDLVRLLPSAVRFQR

SEQ ID NO: 533 - protein, 54 aa, Homo sapiens
TRSKKMKKKTPSNIGIEILEIVKKSYLNLRNVCFKYIYQRTVFSALFWGKYHKM

SEQ ID NO: 534 - protein, 116 aa, Homo sapiens
GFPLNTGSLWWCLGVAWRQLQAWPPAEAWQSGCSLQGPPSAVGGGQGSGGLTFLGLHMPRPVLRSDWCQAPWCKIPLLAPPVPRETGWAINCCSTKGGRKSCEEPPNQYQDTWVLL

SEQ ID NO: 535 - protein, 55 aa, Homo sapiens
KREKEDTHQWPSFLPITEPLKSPVPLFVFVEAGGRDILSELWFKTLSFGPQIPSS

SEQ ID NO: 536 - protein, 43 aa, Homo sapiens
  SITE (20): Xaa equals any of the naturally occurring L-amino acids
TSQITITHIIIRKKFEILQXLPKCDTEHEVNTCCWKNGADRLA

SEQ ID NO: 537 - protein, 51 aa, Homo sapiens
FFRLTLESLGQEQESIQLGGGLRIYFSVYTVLTDVGPRAFIHCHDPTFLSF

SEQ ID NO: 538 - protein, 65 aa, Homo sapiens
  SITE (3): Xaa equals any of the naturally occurring L-amino acids
RTXKSFDNIQHPFVIKTLNKLGAEGKYLNIIMAIYDKSTADILLLAFIFSSKNWIFSEVHLLFKT

SEQ ID NO: 539 - protein, 62 aa, Homo sapiens
  SITE (30): Xaa equals any of the naturally occurring L-amino acids
SQHFGRQRQKDCLSPGVQNQPGQYSDTPSXQKNLKMSWMCGRAPVVSVTWEAGWEDCLSLGD

SEQ ID NO: 540 - protein, 69 aa, Homo sapiens
  SITE (8): Xaa equals any of the naturally occurring L-amino acids
KLEFTLTXGNKSWSSTAVAAALELVDPPGCRNSARGKLQTNIFYEHRCKNPQQNISKSNPTMFKKNYTS

SEQ ID NO: 541 - protein, 42 aa, Homo sapiens
YVANMVLCMYYHFYCLHQQHYDVGGSVPSVLENRKWRHRKMT

SEQ ID NO: 542 - protein, 39 aa, Homo sapiens
TSLTALKTQDIAASGKFMVKTGEVWKVGQLCHLLIYWPM

SEQ ID NO: 543 - protein, 52 aa, Homo sapiens
  SITE (34): Xaa equals any of the naturally occurring L-amino acids
  SITE (43): Xaa equals any of the naturally occurring L-amino acids
HYKISWAWWCMPVIPAIWEAEGESLEPGRRRLQXAEMAPLHSXLGNKNKTPS

SEQ ID NO: 544 - protein, 86 aa, Homo sapiens
  SITE (76): Xaa equals any of the naturally occurring L-amino acids
KERAEFHSLLLLLVLLSLLSQQLQFPSFAYPHLIFTYCKLENEMPQFVRPGWGVMQNWRGSFLIAVLWGSYPFLLXRGFLCFLAHH

SEQ ID NO: 545 - protein, 56 aa, Homo sapiens
NISFLMKLDFKSKGSHQCFISIDGPCLSYTPTNGFIFWLKSFAFICGDLKTLKSNV

SEQ ID NO: 546 - protein, 44 aa, Homo sapiens
PTPISSREFLKSYLSLFLEVPHILSLTRTFSRERSLPLTEMNDC

SEQ ID NO: 547 - protein, 56 aa, Homo sapiens
  SITE (36): Xaa equals any of the naturally occurring L-amino acids
RATTYYLADRRYDMLPSVLSADLCSLLGGVDRYAVXSMWELDKASYEIKKVWYGRT

SEQ ID NO: 548 - protein, 42 aa, Homo sapiens
TSWGRGNVCNCSPSYWWGSGELGGQGQLRWEDHLSPRRSRLQ

SEQ ID NO: 549 - protein, 54 aa, Homo sapiens
QFRMPKYSPSFEEVTCLPFSSCRLFVFVSIYSFRHLLLKAIETQFKWLLINCFE

SEQ ID NO: 550 - protein, 39 aa, Homo sapiens
  SITE (27): Xaa equals any of the naturally occurring L-amino acids
GLSILRSNTTQVANQPLLNVECSIYHXSSELNRGGRIHL

SEQ ID NO: 551 - protein, 61 aa, Homo sapiens
HHQRLRRPTGSDLASCLETEVELGSPGRVHSGLLTETGRPVGCRDGFCLTYCSLEGLALIQ

SEQ ID NO: 552 - protein, 52 aa, Homo sapiens
  SITE (32): Xaa equals any of the naturally occurring L-amino acids
LFSFYANEESVPIFFMHLCHGDALGNENCLMXLSLGCLILSYLTFRKWDSMP

SEQ ID NO: 553 - protein, 61 aa, Homo sapiens
PTSTQKVSIFCVPKNPESSKFLLRSCCWPGTGANTYNPISTKNTKKPGIVTGTYSPSYWGG

SEQ ID NO: 554 - protein, 45 aa, Homo sapiens
EINIILHDSSFLLRKMSCWAQWHVPVVSAMWEDHLRPGVQGYSVL

SEQ ID NO: 555 - protein, 33 aa, Homo sapiens
  SITE (17): Xaa equals any of the naturally occurring L-amino acids
VAGHDGTHLKSQLLGSXRQKDHLNPGVGGCSEL

SEQ ID NO: 556 - protein, 101 aa, Homo sapiens
RLCLSDLPTLTQGRLLTSQSVSSIRSLIIIQILPPKGKEEIIYTTMLYIVYLDIPKSLYFWMLFLKQMFGWTTKVSNFIGFSQVFVVTTVVSILPKTLIFP

SEQ ID NO: 557 - protein, 37 aa, Homo sapiens
KIWGWAWWLMPLIPALWEAEVGGSPEVRSLRPAWSTL

SEQ ID NO: 558 - protein, 72 aa, Homo sapiens
SLDNVCVFLQAKTTTTNKPHCRIENRSCFCYGLRRVFYIILLMILNQMLLTFLVDCRYSTNIAVLGNDQLPG

SEQ ID NO: 559 - protein, 85 aa, Homo sapiens
  SITE (82): Xaa equals any of the naturally occurring L-amino acids
RFKKSLTSILYNLFWKREEETLPNSLPQTSITLILKPTKYQQYQNKVNFRLISLANINTKFPNKIAKIDFNNILIIYHDQMXFSS

SEQ ID NO: 560 - protein, 57 aa, Homo sapiens
HYHILSNYLLNIYSVLFLFVLLFLLIQFNIQPCSSYNNRRLTVMRIEIQILRVCIRN

SEQ ID NO: 561 - protein, 186 aa, Homo sapiens
KLMPFSNQLEMGSEKGAVRPTAFKPVLPRSGAILHSSPESASHQLHPAPPDKPKEQELKPGLCSGALSDSGRNSMSSLPTHSTSSSYQLDPLVTPVGPTSRFGGSAHNITQGIVLQDSNMMSLKALSFSDGGSKLGHSNKADKGPSCVRSPISTDECSIQELEQKLLEREGALQKLQRSFEEKELA

SEQ ID NO: 562 - protein, 145 aa, Homo sapiens
  SITE (2): Xaa equals any of the naturally occurring L-amino acids
  SITE (4): Xaa equals any of the naturally occurring L-amino acids
  SITE (27): Xaa equals any of the naturally occurring L-amino acids
FXKXLTIGKAGTPAGTGPEFPGRPTRXKPHQNSCNSVRQLFKTKQLVTHRDRGAQGLPAARTTALQRSPLQQEIWESTTALNLPSALAPQGLTAKDAHFLGDTDPIQEGARDHAAGGPFQDRQASVAAQTLSWERGQENTPLVEI

SEQ ID NO: 563 - protein, 53 aa, Homo sapiens
FCIFFVEMGFHHVARVGLELLGSSDLTALASRGAGITGVSHFAWPRLRFFNSF

SEQ ID NO: 564 - protein, 49 aa, Homo sapiens
SSNCTFAYTAKRTCSDPHKKTSIKVFIPLWFAVVSRQIGLTDICLFGSQ

SEQ ID NO: 565 - protein, 74 aa, Homo sapiens
  SITE (58): Xaa equals any of the naturally occurring L-amino acids
NTCVLENTVYMGFRLCCVVLIFLENLLFLNAATEKFPLFSVYTSVCLTSSSASFLDLXRCGCGLLAKKSRPFIF

SEQ ID NO: 566 - protein, 65 aa, Homo sapiens
STLTYSHLLGDFCRTLTIISIPDLNLMLKSMLGSSNFESYLLFWLVVTQISKNEHGFAPGGRGFK

SEQ ID NO: 567 - protein, 55 aa, Homo sapiens
LESHKIKSENSACISKNIILYACQCSYYILLWVGSIKDGKKDVCYEAFSPLFITP

SEQ ID NO: 568 - protein, 48 aa, Homo sapiens
  SITE (28): Xaa equals any of the naturally occurring L-amino acids
TIFRLTFDHIKKSFLKTFYHFIFPYGNXKKTFYHLPLSPTGIPMGKVP

SEQ ID NO: 569 - protein, 106 aa, Homo sapiens
  SITE (6): Xaa equals any of the naturally occurring L-amino acids
  SITE (11): Xaa equals any of the naturally occurring L-amino acids
  SITE (14): Xaa equals any of the naturally occurring L-amino acids
  SITE (18): Xaa equals any of the naturally occurring L-amino acids
  SITE (25): Xaa equals any of the naturally occurring L-amino acids
  SITE (28): Xaa equals any of the naturally occurring L-amino acids
KWGFPXCGPKXWSXTPDXRLSTRLXLSXCWDYKCEPPHPALISAFLYLLGRPTFWHPLTRSPQRFLLLNMCASHSDVLCSFCSPSTSHSISSSDLGLEWPNDPTTF

SEQ ID NO: 570 - protein, 34 aa, Homo sapiens
SSFLPDLYQDRVLLAVSERPISPYSHQHWKGSKG

SEQ ID NO: 571 - protein, 53 aa, Homo sapiens
KESNFPFCTNLGQKYSKRVVTTVSSHLDERINKYTTVVMVIIRGRIITIYILH

SEQ ID NO: 572 - protein, 57 aa, Homo sapiens
EGWHLLRGSKGGNKGQFHWVSDTEIPAWIVVEDEAAPSWMLIRHVVLWLTPVLECLL

SEQ ID NO: 573 - protein, 66 aa, Homo sapiens
AHFILGVRGKRNLHPFALESVAYMPRCLQFTLYIHGYNLVGTREGAGGRQIVLSSVNTGEQMVVIC

SEQ ID NO: 574 - protein, 63 aa, Homo sapiens
EISRVSKFPGQSVSRFEVNRDSRKTKKSRLNSCLSLGKNLATAALVNNGPEKSGEKACSETNT

SEQ ID NO: 575 - protein, 96 aa, Homo sapiens
  SITE (6): Xaa equals any of the naturally occurring L-amino acids
  SITE (58): Xaa equals any of the naturally occurring L-amino acids
  SITE (59): Xaa equals any of the naturally occurring L-amino acids
  SITE (68): Xaa equals any of the naturally occurring L-amino acids
SFGRRXEVRGTTGEQAISCNHHRGPEKHWSSGSSSPWPPACASPGPAATPLFPRLGTXXCLSLFLPTXLWCFSGHQPRHIHQHLSVPPPFGDLKSL

SEQ ID NO: 576 - protein, 76 aa, Homo sapiens
  SITE (10): Xaa equals any of the naturally occurring L-amino acids
  SITE (12): Xaa equals any of the naturally occurring L-amino acids
  SITE (31): Xaa equals any of the naturally occurring L-amino acids
  SITE (48): Xaa equals any of the naturally occurring L-amino acids
FGNCHLLEYXRXGYGIGPWLYLSLTWALIRXKQSEGFEPQVKVLGKLXKMVQVSRDIYLYAYCFLLAKISHLLQMP

SEQ ID NO: 577 - protein, 62 aa, Homo sapiens
RRQSAFFSLPIQTLISSRNTLRDTPRIVFGRKSAPHGPVKLTHKSNHHITLDYCSPTPSTST

SEQ ID NO: 578 - protein, 36 aa, Homo sapiens
HKTEICYYLPNFTFKKLRSEVKYILSHKLGNGRAGI

SEQ ID NO: 579 - protein, 59 aa, Homo sapiens
PVSPVVSCAKENRFLQKYKGLMGKEFKSCLYMQYIGYDIIYGFLFAAVCIFLIPNQTKL

SEQ ID NO: 580 - protein, 107 aa, Homo sapiens
  SITE (89): Xaa equals any of the naturally occurring L-amino acids
  SITE (93): Xaa equals any of the naturally occurring L-amino acids
TFPSEVSQHCRATVYRKCQLICRQNHQASADTALTFLPFPPSVYMCMHNSTFTEVLPGTVLGSEHDAVALVESTFKSILTYLKERIPLXEALXPHCVSQKALSPYGY

SEQ ID NO: 581 - protein, 52 aa, Homo sapiens
SILPSSRSLPELRAPSAFPQTLLTRGCLRACNIGITWGLLDMLTLGFHPGLL

SEQ ID NO: 582 - protein, 83 aa, Homo sapiens
  SITE (55): Xaa equals any of the naturally occurring L-amino acids
  SITE (60): Xaa equals any of the naturally occurring L-amino acids
  SITE (69): Xaa equals any of the naturally occurring L-amino acids
NYISCSVSWAIGYFWFYDFRFYRPVEYRPCAYEDQVTSLLPTSLHSNMPFHGEVXILTSXRKYQVKNCXILSISRKKSLCLPI

SEQ ID NO: 583 - protein, 57 aa, Homo sapiens
QHMRALGKNKTKTTLEDFRINRGHVFLPNILSKVENHGFKNFFVGLDMSKCIKFQVC

SEQ ID NO: 584 - protein, 43 aa, Homo sapiens
  SITE (36): Xaa equals any of the naturally occurring L-amino acids
  SITE (41): Xaa equals any of the naturally occurring L-amino acids
APLLMGVFQRLALTKFSFSKTRKDTFVDRQFGLEWXCFYIXFN

SEQ ID NO: 585 - protein, 170 aa, Homo sapiens
EAGLRAPRRSQLEVAVVTTERAKHFYSPQDIPVTLYSDADEWEMWKSRSDPVLHIDLRRWADLLLVAPLDANTLGKVASGICDNLLTCVMRAWDRSKPLLFCPAMNTAMWEHPITAQQVDQLKAFGYVEIPCVAKKLVCGDEGLGAMAEVGTIVDKVKEVLFQHSGFQQS

SEQ ID NO: 586 - protein, 48 aa, Homo sapiens
  SITE (8): Xaa equals any of the naturally occurring L-amino acids
  SITE (11): Xaa equals any of the naturally occurring L-amino acids
HRARRPAXEDXLGPRAEIAGMEGPLDWRLTGQIFTFVDHWKRYLPRID

SEQ ID NO: 587 - protein, 88 aa, Homo sapiens
  SITE (69): Xaa equals any of the naturally occurring L-amino acids
  SITE (84): Xaa equals any of the naturally occurring L-amino acids
FPRTLFSCLRSFNTYCCFVHVLFFLLSLRLFRKFFIEAPPPCFLQVAFICFFICFSCNKFFSHVGNSGXYQKLIENSDHVSNTXNLSS

SEQ ID NO: 588 - protein, 62 aa, Homo sapiens
YFNKPGLNCFISKLKKLIVKYFDLSNLIQLTMVHLELDLSIRGPSCILLHHSTISILIKLSH

SEQ ID NO: 589 - protein, 155 aa, Homo sapiens
GRWRRCRRPPEEPPVAAQVAAQVAAPVALPSPPTPSDGGTKRPGLRALKKMGLTEDEDVRAMLRGSRLRKIRSRTWHKERLYRLQEDGLSVWFQRRIPRAPSQHIFFVQHIEAVREGHQSEGLRRFGGAFAPARCLTIAFKGRRKNLDLAAPTAE

SEQ ID NO: 590 - protein, 51 aa, Homo sapiens
  SITE (19): Xaa equals any of the naturally occurring L-amino acids
  SITE (26): Xaa equals any of the naturally occurring L-amino acids
  SITE (40): Xaa equals any of the naturally occurring L-amino acids
SSLFCTEANSHLCNILKHXVKCEAKXGHFSNAVGRVGWLXLKGIRMSSRWH

SEQ ID NO: 591 - protein, 92 aa, Homo sapiens
  SITE (43): Xaa equals any of the naturally occurring L-amino acids
  SITE (45): Xaa equals any of the naturally occurring L-amino acids
  SITE (66): Xaa equals any of the naturally occurring L-amino acids
  SITE (79): Xaa equals any of the naturally occurring L-amino acids
QLLHACVSAALHRPLQVLRAAPAIPIGDCESCCLCRAHSECSXRXVETPRKPLLPESLGRTALLQXGDCMVAFSSLKVXGQGNHFYFFKNSF

SEQ ID NO: 592 - protein, 67 aa, Homo sapiens
  SITE (32): Xaa equals any of the naturally occurring L-amino acids
  SITE (34): Xaa equals any of the naturally occurring L-amino acids
  SITE (38): Xaa equals any of the naturally occurring L-amino acids
  SITE (41): Xaa equals any of the naturally occurring L-amino acids
AFGHLKHCREWYVLVGAFVTVRNQQMVCGAFXDXFSTXFSXGLGAELDAGDAQMRKAQRLFSDCLTV

SEQ ID NO: 593 - protein, 108 aa, Homo sapiens
  SITE (6): Xaa equals any of the naturally occurring L-amino acids
RTTFHXNPSTSFQLLHYCHSPGYCHLSADDGNSSLWACSACPPAALQVILHIVARMIFSELKSHHVTPFKNTVGLTPVIPALWEAKVGRLRGQEIETILANTVKPHLY

SEQ ID NO: 594 - protein, 57 aa, Homo sapiens
GSDFLLYLQSTGGTARLIQIPLTIHLPLGDISLAGFLSMLFNMMKFHTVMFICFREE

SEQ ID NO: 595 - DNA, 446 bp, Homo sapiens
agaaaggaaagagattcttctggccagcaagtgaaaagctgttcttttggcaggagtgtgtttagctctgggacctggagcggctgctatagaaagacagaggcatcgggagttcttgaagacacacatctggtgggggttcttggcattgaggaagatgcatgatttccctaaagaccctgggagcgtttcctcttccccaggcagctttcccaggccgcacctccatgtcggagtcagtgggggtgagaacggggtacccaagctccagccaggcttgagtgggttggacttcctgtcggtgtccacacagcctccttttctggtggacataacggttgagatgcatgtcaaggtgaagccagtggctttaaaaccttcattttttagccagctactctggctccaggccctttccttagcagcagggagttgaggccaagctc

SEQ ID NO: 596 - DNA, 495 bp, Homo sapiens
gagatttctttttattctgtttactcttcttggtatgcacgtacctgaatattaaggatattttatgaagtcatgacattaccagattaatgttggttttgttttaaggtactttctgactgctcgggttaattcctacagacgattctggtaaagaatagcctttaagttttaaaagtgttgacttatttcagatgtcttaataaagttaacttccagttattacatgtaacgtatataaagctctcattttcctttattctcgttaattgtttgcataacaaattcaaagggaaatttgcttggcagagatcagatagcagagatgagatttaaaaacaggtaatttggctactagcctgggagtttgaagattccaagtttgcatccatgtgtagtcacttaacatttctgtccttatctgtaaatgggaataacacctacttgatagggttgttacattatcttggccacctcaggttctctttggctgag

SEQ ID NO: 597 - DNA, 190 bp, Homo sapiens
tttttttttttttttgagatggagtttcactcttattgcccaggctggagtgcaatggcacgatctcagctcactgcaacctctgcctcccaggttcaagcgattctcctgcctcaggctcccgagtagctgggattacaggcatgcaccaccatgcctggctaatttttttgtatttttagtagagacg

SEQ ID NO: 598 - DNA, 160 bp, Homo sapiens
ttctttctcttttttttttttgagacggagtctcactctgtcacccaggctggagtgcagtggcatgatctcggctcactgcaacctccacctcccaggttccagcaattctcctgcctcagcctcccgagtagctgggattacaggggctagcagccac

SEQ ID NO: 599 - DNA, 31994 bp, Homo sapiens
tgatcctcttctccctgcctcacctggtccaacttgagagcttttggggatgagaagagggaagattcctcctgccaccccagtcttggtcctaaactgtcactgggggtggttgtagcctggaggtcagttggatcccttgggaagagaggcgtcgttgagggggagtctagatggcgattctggggttctgactacttgggcttcctctttgtcctgattctcttgtatccctacttcctttaggagtctttttggcactctggggtccaggtgctgggtgggtggtgatgtcaggggttcccaggcatggctgccttgctgagagtctgctctatgaaaaggttggcctgtaagcatcctgagtttggagaccccacagagctctttgagaaggggcatgtgaactgaggtggtggaaaaagctgggtgtggcacggtagttggtgcctgggttccaactctgggtctttcaaggctttgctggatgaaccagggtaggttctacctatgctctctgggcctcagtttcctcactggccaggcaaaatgctggtgaggtgttgtttagctttgggattttagggaactcagtccaaagttctctggacctggaggtggcaaagaatggtggatgtcttttgaggaggaactgggtttctcccctctcttcctggctcctctgttccctctcagccatccaagcttggtgggcaggacaagcagcctgttttgtgtgaggctcagggttgatgaacagccattttttgtgggcagccatgttgtaatgaacaagctcgatgggatttcctgtcaggaggcctgttggatagtggtgtagagaggtagagttgtgtgtggagtttgggctttggagcaaggcaagctttgagccatcatccctcaattctctcatcacctccagacctcagcatctcctccttacctgctttatagctttaggcaaactacttgccccctcagctgcccattttgcaaaagtttgtccatgcccaggtgtgtctgaccttgctcaccttggaccttggccggttcttcctcttgcccagaatgggcagtttgccccagggtcatcttggttcttcctaggagcctttgtccactcctagtaacctatctttgatagcaaaggcccttcatttggcatctaggaacctgctgatttcttgggctcttcttaccccaactggaattgggtagctagctggtggggaagcaggaaggggtctctgcccaggcaacgtggatttgagtcctgtttctgcagtaagcttttctgtggtcttcaggcagttctcttttctggttcttggtttctccctccatgaaatgggtagtgttgaggagggaggttggactcattgctctgaagcaagttatagtctcctccctgctcccactcccctcacccttcatgaaagttttaagtgggaccccttggcctttggggattgtgctaggacatttcaagcagtgttcagcgtccttggctggtgctgagcccttgggtgtgtttcttttaacaactttaatgagatgtaattcatgtaccatactattcacctctttgaagtgtacagttcagtggcttttagtatattcacagatttgtgcgtccatcacatcactacagtccattttagaacattttcatcaccttaaagagaaatccagcactctttagctatgatcccccaatttcctcatccctttccagcctctggcaaccactaatctactttctggcttgattgatttgtctgttctggatgtttcatgtaaatggaataatagaatatgcagttgtttgttacttggcttttttcacttagcataatatgttcaaggcttatccatgttgtagcatacatcagtgcttcattcctttctattactgaataacaggaccttgggtttttttgttttttggtttttgtttttgtttttgttttttttttaaggcggagtcttgctctgctgcccaggctggagtgcagtggcgcaatctcaggtcgctgcaacctccggcttccgggttcaagtgattctcctgcctcagcctcccaagtagctggggctacaggcatctgccaccacacccggctaatttttgtatatttagtagagatggggtttcaccatgttggcaaagctggtctcctgaactcctgacctcaggtgatctgcctgccttggcctcccaaagtgctgggattacaggtgtgagtcaccgcaccctgccaatcttagaggtttttaatccccctgccctcagtggcctagccaaatgttggggccttgctcttctccccttctgccctggagggcttgtgttggtccttagagagtagtgtgtctatgttcctcgttggatgggttgcctgtgtgtgtttttttttgagatggagtctcactctgtcccccaggctggagtgtagtggcgcgatcttggctcactgcaacctccacctcccaggttcacaccattctcctgcctcagcctcccgagtagctggaactacaggtgcctgccacctcgtctggctaatatttttgtatttttagtagagacagggattcactgtgttagccaggatgatctcgatctcctgacttcgtgatccgcccacctcggcctcccaaagtgctgggattacaggcgtgagccaccacgcctggccccctgtgttttgtccatggagccaggctagtgttcctgggtgctttgctggagggggtggtcttggcaccagggctgctgggacagagctgtgagtcacagaatgctaaacaccttttgaccataggctctgggaagacatctgtccatgaactgccactgctgctgccatcttttgcccccccaccccacccccacttcagtggcagctcatccatccataggcagggtcagtagtttcccagggtgagaagggagattccaggcccctgctgccttaattctaacctcccaccctggaggatggtaggcaggtggaccttgcagagcgggatccatgccatattgtctcacacctgtgaggcactagggaacagacaccaaggagtgctaccaaggggggtgtgttagtttcctgtggctgttgtgacaaatgttaccacagactgggtggtttaaaacaacagaagttggccgggtgcggtggctcacccctgtaatcccagcactttgggaggccgaggcgggtggatcacgaggtcaggagttcaagaccagcctggccaagatagtaaaaccccatctctactaaaaatataaaaattagctgggtgtggtggtgggtgcctgtaatcccagctactcgggaggctgaggcagagaattgcttgaacccaggagacggattggaggttgcagtgaggtgggggttgcagtaagctgagattgcgccactgcactccagcctgggtgacagagcgagactccatctcaaaaaaaaaaaaaaaaaaaaaaagagagagagaagtttattctgtcacaattctggaggccagaagtccacaatcagtttcactgcatccaaatcaaagtgttggcagggccacactccttctggaagctctcagggagaatttagaccttctctagcctctcgtggctgccaacattccttggtttatgactgcatcattctaatctctgcctccatcttcaccatcgccttctctgtatatgtggtttccttttctgtctgtatcaaatttccctctgtctctcttttataaggacacttgtgattgcatttaggtcctacctgatactctaagataaccccccatctccagatttaataatgtaagttaattacatctgcaaacactttttttcttttctcttctctttttttttttttttttgaggtggaatctcactctgtcacccaggcgcagtctcggctcaccgcaacctccgcctcctgggttcaagctattctcctgcctcaccctcctgagtagctgggattgcaggcgcccaccaccacacctggctaatttttgtatttttagtagagatggggttttgccatgttggccaggctggtttcaaactcctgaccttagttgatccacccgcctcggcctcccaaagtgctgggattacaggcatgagccactgtgcccgggcttttcttttcttttcagacagtgctggcctctgtcacccaggctggagtgcagtggcgtaatcttggctcactgcaccctccacttcctggactcaagtgatcctccagcctcagcctcctgagtagctgggaccacaggtgcgagccaccatgcccggttaatttttggtgtttatttatttgtttttgagatggagtctcgctgtgtcacccaggctggagtgcagtggtgctatctcggctcactgcaaccttcgcctcccaggttccagcgattctcctgcctcagcctcctgagtagttgggattacaggcgcctgctaccatgaccagctaatttttgtatttttagtagagatagggtttcaccatgttggccaggctggtctcgaactcctgacctcaggtgatccacccgcctcggcctcccagagtgccgcgattacaggcgtgaatcaccgtacctggcctgtattttttgtagagatgagatttcaccatgttgcccaggctagtcttgaactcttgagctcaaagcgatctgcctgccttagcctcccaaagtgctgggattgcaggcatgagccacgacgcctggccctacctttttcattataaggtaacatttacaagttccaggggggttagggtttgatatctttgcgtggctattaatcagcctactagagaggcttttttccctcctggggaagggaagggaactcattaagtggtctcttactgggcaaagccctgtaatatttgagtctgcccagcatccctattattgggaggcttggtatccccattcacagattggaaaactgtggctcagagcagttcatcatcacatggctaataattggtggagctagattggaacctaagtcagttgggttccacagcctgctccaacttcacttgggcccttagaccactaggttacagaatcttgcctcagctcctgggatcctctggtgttagggagctttactcagcctttttgtggaggctcaaagatatggagggattttcccataggctcagcgatgagtttgcaaggttcacaatctcctcaggccagggcattgttggagcttaaacttatctatggctgagctatcccctaccccccacccctactagcccttcctgagcaacattttctccccaaaaggagaaagagaagggccagagcccaaactcctcaggctgctgatgacaaagccagtgggtggctagcagtccagcctctagatccaagcctggatgccagtttgactgccccaggacccaaaccctgcagtgcgaggggcctattcaggtctctttcatgtttagagacaaaccaggatattctgtggatgggctgcaaggtatgtcctccatgctgtggctcgtgggggccttccctgttgcctctacactaggctttgctggtatccaaactccagctcctttctctttctgcctttgtttttttgttttttgttttgtttttgtttttgtttttgagacatagtcttgctctgttgcccaggctggctggggtgcaatggtgccatctcggctcactgcaacctccacctcccgagttcaagcgattctcctgtctcagcctcccaagtaactgggattacaggcacacgccaccacgccctgctaattttttgtattttcagtagagacaaggcttcgccatgtcggccaggctggtcttaaactcctaacctcagatgatccttccgccttggcctcccaaagtgctgggattacaggcgtgagccaccgtgtctggcctcctttctgcctttgtaaagtgagggtaatgtttcctgccacctgggctgtggtcaggaaaattaaacgaggtcaccctttgcatctggcatggggcaggtattcagttaatatgagttcatctttcttcctggtcctccctgcttacctgcctagtactacccagaactttagctctactgaattcattgctgggctccaggcattcctggtacttcgtggcagaagtgacttcatttctcatccagttaacaagcatttttggaggtcttggtgttttaatcctttggtcaggtggcacctcctctcaggtgctagccttaatgactgtgtttctttttttcttttttttttttttccttgagacagagttttgctcttattgcccaggctggagtgcaatggtgcgatcttggctcaccacaacctccgcctcccgggttcaagcgattctcctgcctcagcctcccgagtagctgggattacaggcatgcaccaccacacctggctaattttgtatttttcagtagagacggggtttctccatgttggtcaggctggtctcaaactcccgacctcaggtgatccgcccacctcagcctcccaaagttctgggattacaggtgtgaaccaccgtgcctggcccaatgactgtgtttcttttcttttcttcttttttttgagacagagtctcactctgtcgcctaggctagaatacagtggtatgatcccggctcactgcaacttctgtctcccaggttcaagcgattcttctccctcagcctcctgatttagctgggattacaggcatgcaccaccatgcccagttaatttttttttgtattttttagtagaaacaaggttttaccatgttggccaggctggtcttgaactcttgatctcaagtgatccacctgcctcggcctcccaaagtgctgggattacaggcgagagccacttcgcccagcctctttctgtttcacaacacctggcatttacatttttcacagccttgttcataccttgtggtggttacctgtttccctacccctctgctaagtagtttgtgagcttatcaagagtggagactaagtctgattcatttcactgtcctcactgcccagcccagtatcttacttagtagctacctggtaagtctttcttgaatggataagtaggagcccctctcctgtttgatctccttttctcctctctttttcccctctctccaaagccaggaagtcgctgtgttcccttctttttaagaacctattcttgtgtcaggtttgggactatagttgtggttgcaccatccctgctggagacccctggctggggcaggcccatgactctgggagatggctgaccatgtgtggccaggatggacttgggcataactggctggagtgtgttaatccacaggcttgggggcaaggagggacacctggactactggaatgttgtgcacaaacaggagtccttgtgctgcgcatggaagctcattaagggcttccaggtgtctttgtcatctctagaaatccagccacattttcctggggtgtgggccctgatgatgggactggctgggtattcccttgtcacctcttcctcccctcctgtcccgctactcacctaggactttctgagggtctctcagttgtgcataatctctgtgctgatctcctccccttctgtgattggcgacaacttcccctagtatatggtacgttatttacaaagcttctttaggtcctgaaactcctcacagctctgtccggtagatcaacatatcccccattctataggaaactgagagtgataacagacagcaagtgtgtggcaaagctggggttggaacccagagctcttgcgttccaaaccttgtgcttacaactttgccagagatgcttctcctctggctttcttaggggatgggttccaccccttgcttgagctggggaaaaatggccttacggataggtgggcccctatgtctggtctctaataccccagatcctataaatccctgggcaggcctgtgtccacaaggagcaggcttgggatcctgtagtttgcagccttgttgctaggtcaggctggctgcttctggtagccagcagagggcgtgaggggcccaggaaaggtctgctgcttctggttggttttgttttgaaatgaaaattatgttttaagaggttatatggtcattatttttttaataaaaaaatatgcatttgtacaggttcatttaagttgaaccttcgtggtgccaggtgtgctttggaatttaggaaaaaaacaatttataaaacttacctggtgtgtatactttgtgttacataacacctccagcagggtctgaggcagcacctcataatcaaacacctgaatgttttctgcattgaaatatttgaatatttaccccaagtgggataaatagattcttgtcagttctggtcaggttatgatgccaaatgaattagataaagacttttgggccgggcacagtggctcatgtctgtaatcccagcactttgggaggccgaggcgggtggatcacgagatcaggagatcgagaccatcctggctaacatggtgaaaccccgtctctactaaaaatacaaaaaattagccaggcatggtggcaggcgcctgtagtcccagctagtcgggaggctgaggcaggagaatggcatgaacccgggaggcagagcttgcagtgagccgagatagtgccactgcactccggcctgggcaaaagagtgagactgcatctcaaaaaaaaaaaaaaaaaaaaagacttgattttcaaagctttttgggtttagtgtaactttataaaagggaaagtgcaataaaatcgctgataacaccaggacttagggatattttgctgtctagccttcccaattttgtgtacgtgtgtttgtatacatacatatgtatatatgtgtagatatctgttaaatgtgttcagtcacagatgagaacattgtttgcacacttttgccttctagagtatatctcttttttttttttttgagacagagtttcgctcttgttgcccaggctggaacgcaatggggtgatcttagctcaccgcaacctcttacctcctgggttcgaacgattctcctgcctaagcctcccatgtagctgggattacaggcatgcaccaccacgcctgactacttttgtatttttattagagacggggtttctccatgttggtcaggctggtctcgaactcccgacctcaggtgatccacccaccttggcctcccaaagtgctgggattacaggtgtgagccaccatgcccggcctacagcatatcttggaatcctctagccctttgtcaggttcaggatctaggctcttgctagttaccccctcttcaccacctttcctagatgaaactccttgaggtagagccacattctccacccaggcacttgctgggtctgagtctctggctgcctgaggcagtgtggctccctgggccaggccctgcaaggtcaacagaagccataaggcatatggggccactgttctcagggcacctaggacccttttggaagtaagtcttagtttcactcagcaactaattccctaaaagagtctcctacttcacatgcatggagtggtcaaacagggctgagaactttaccttggccagcgtcctctctgtcaatgatctaggcctctcgggagcttgaggtcggggccctggggagggagtacaggttttccctgttgctgacccccacctcttccctccagcaggagcattggtttgaaaaggccctacgagacaagaagggcttcatcatcaagcagatgaaggaggatggcgcctgtctcttccgggctgtaggtgagtctctgccttagtccttaagggcctagggctgcccctaagctgtgtcccagttatcaggaatagcccctgagacagggttgaggcagagctagctaatcttttagggactctaggctccagcctcaagttggtatctgacctctagccgtgggtcttgagacattgtagtggtgcaagattaatatgcataataacagcaagaagaatgataaagaaaataatatcctttgggacacattgtcaggtgctacaggaaacctctttgattcccctctaagctaggtgagtgtagggactactgttgcttccatttgtcagatgagaaaagtggctcagagatggtgggtgacttgtctggagtgaaataataagtggtagagttgggattcagtgtctgggttagattagtctgaggcccatgctcttaaccatagcacactgctgccaccctgggctgtatgacccctaggtttatacccagatcccatctctggtgtgttgcgggtctctgttcctcaatctgtgtgtatgggggctatcagactagatctttacaaatttcttatatcatagaattttttttcaacttatataaaagtagagagaatgatgaaccctcatgtacccatcatccagcttcaaaatagtcaatacgtggccagccttgtttcatcactatcccgcccactctttctcactcccctgaaagaagagtatttttaaagcaaaaccccgacattggatcatttcattcataaatatttctgtatgtttctctgacagatacagacttactctcttctttttaacataatcaaaatgccattactgcacctaacagaattaataatgccttaataccatctgttatccagtctgagttagatctttgaggccattttggctctgaatctgtgacccaacaagtagttgtgaggtcctgtgctagggtgaaggggaagctgggaatgtgacctgatcctccctgtggttctctgatatctaccaaggaaaagtgccctctgataggagctttgagctgggagtcagaagacctaccttctagttctggccctgactcataactgctgtgacacttggccttggtcttcccgtctgtgaaatggtgttgattctcaatgcctctttgagttccttcttggtctgctattctctccgtctgtgggtaccccccatgtctactggtgggctggggtgttttaggctccatccctggctgcacaactgattcttggtatgaccttaggcaagcagctcttctttcctgaggctgtttcctcatctgtaaaatggggctaaaagaccctaatgctgtaacgatttaatgaagttgctttggtaaatccctttagtgcctgacacatatagtagaccctcatggaacagtagcatttgtaaaacccagatgccattttcactggtgcctcagagtcacatgtgtttgttgaaagggtggagtgaatggtctcctctctattctgccaagcagaagaggctcaggcaatgggctctattggactgggaaaaaacttatccctcctacccctctggctcaagtttgtgttttccctgggatgtttcccagaggaagagctgggtttcggggcatcttggacaaaagaaaggcaaagaaagaataggtgggggcctgttaggtgctaggccctgtgttgagacctcaggctagatgtggggtaagcagggcttctggtggagttaggattagagaatgcagcgggcatctgagtcttgggcagtcattgagggtaagccttgggactggctagtgaggacctggcttgtgtagtaactcatatcaagagccgtgtgtgtgtgtgtgtgtgtgtgtgtgtgtgtgtgtgtatctagctagctgttctctgtgtgtgtgtgtgtgtgtgtgtgtgtgtgtgtgtgtgtgtatgtgtgtgtgtatctagctagctgttctccccaaatacccccgacccttggggctagctagtgaggacctggcttgttgtagtaactcgtatcaagagcagtatttgtgtgtgtgtgtgtgtctatatgtatctagctgttctccccaaatactcccgacccttcctcccactggggccttcggtaaggggcctctacttacaggaagagctgaccagggcaggttgaaggcctttccttatcggcactatggctacacatttcccctgactgggctgcctttggcttttctctgtaaaacctcagaagtcctctggcctctcccccgaagtacatggcccttggtctctagaccttatctggaggtttccttggtgcagagtgcataatacatgtgcctgggaaggggactttgtccctgggctttttgctgcccccgtttccagcctcgcctggatggggacagatggcagtcagcttagactgtagtgtgaagccctacaggctgacttcctgccatgtgttgaatagtggaaggaacgtggagcagagagttggagttgggcgggggctgcaaacatagagggcactgtttccttgacccctgctgtgtgctaggcattcagctgggtgcttcaggctcactgcaaaacttggatcattatcccatgagacaggtgaaaagattgaagcatagaaagggaaatgacatgctcagggccattagccagagctggcctgggaacccagaggtgtccaaaggacacgcattcttttttttttttttttttttttttgagatggagtctccctctgtcgcccaggctggaatgtgcagtggcgtgatctcggctcactgcaacctctgcctcccgggttcaagtgattcttctgcctcagcctcctgagtagctaggattacaggcgtgcaccaccacacctggttaatttttgtgtttttagcagagatggggtttcaccatgttggtcaggctggtctcaaactcctgactttgtgatccacccgctttggcctcccaaagtgttgggattataggcatgagccaccgcatccggccaggacacattctttttatgatcctaggatccttagcttcttagcttggttgtcaactggctggatgaccttggctgtgttccttgacttctctggaccttacctcctccaagtaggagcacgtggccctctgttgttgggagtcttgaggcaggtggctttctgccttctgttcccctggattatcttcctatagggtcctaccatttgctttagagacttctgagaattgcctactccccaggtagctgcctgcctgccattggttcccctgagttaagcaatatccattgcttgcgctcagttctctcccacctcctcttattggggattcatgagcatcattgaaggcttgggtggagtggaggtgggaacctgagcctcagaggtatcctgtggcccaccctgtccctgttatgctcagataacctcctcctggaaacatgactctgcatctctcccttgctccctccctccatgtggctttgactcagcagaaacctctaaccctgaccagggtcctggtgctagcttctgtgggcagagtgaaggccacatggttgtttctacatgggccatgggggagtggcaagggctgtgcatgttaccacgatgaggcccagaaacattagctaggcccactcttctgggccttttggtcttggaacatcagcactaggagggatggatctgagatcaattttgattgttttataaatggggaaactgaggcctcaagagaaagccaagaccctaccctatctaggtcatacaaccagtgtcagaacattggtatttgaggttgaaccaggccacagaaagaagattcccacgggccatttcctgtacaccagcttccttcagcctctcccgtgtatccttcaggtttctcatccttgcagtgggaatccttgagcagaggagcacacatctcaggaaccagactatccagtgggatgagttctgtctctcccactgagggtatgctagttggggtagttggggctacagaccaggtcacaccacagctgcttgacaggcaagtgagacctttgtcctggctcatctcctcaggagattggttctcagtggggccagggttcccactggaccaggagggtagtggggagcagaccaggtccctgtctccctctgcagctgtgtgtacacacgttagtgtggtttgtttttaggttccctgtagacacctagcttccttttttgcccttagcggaacttgctgtggctcttctgggaggcaggcagctacctggggagtaggcagttctcagatgtctctaaagcaaatggtaggaccctataggaagataatccaggctctcatgtcttgcttcttaacataaatctgggtacattattggttacattacattagttacataaggacttcccccgggcaacagaggagagaggttgaggctagtctgttagagctcttggttatttcccctgccctccacctaccctgccagaggccaggaaggaggttggtggggtagggggtccctcagtttatagagcctcacatcttcagtctttcctgaagtggcaagggcatctactcattgaatgtgatagttctctgttgtgggatttgttgggtgagcatttggcctcagggagcatctttggcagtctctgctgtatgtgtatacacatgtgcatttctatactggtgtctctgtgtgtccagaaaaaggaaagaagtggggtgtgtatggggagggtaaggttcatattggcctctgtggccctagggagagatgcagcccctgatatctataatctctgccctctcccatgcctttcctgggttctagctgattcctgcttgtgctggtgtggaaactgaggcacacaagatcaggtcctgccccagggagtaaggtgactaagatggtggctggattggggtgaaggtggtaatatcagctggggccagcagttaccctttgagagcctggcctccccttcactccccctaaatctgtgatcccaggcaagctttgccacatttctgtgtctcctgggtaaagtaagagtgttttggtaaggatagaatgagttggagtgtgaaaagtctttggtgtgggaccaattgtagtattgtactgaggatttctgagccctgtttgagatgggaacagaggtagaatggtgggggacccccttccagctggcctctgggaggggagaacaggtgcagattgcccacaagtgcagcgtcagcaagaggaggagtttcagtttctatcaaaacaagttctctgaattcccctacctctgcaggtcatccccccaacctcagacccctccacagggaagtcaagcctggcccccagccctgtgtgccagccttctgggaagaggagggctttctggaggacagaggtggagctaggaaagtcagaaaaacgaattcttttttttttttttgagacagagtttcgctcttgttgcctaggctgtagtgcagtggtgtgatcttggctcattgcaacctccacctcccgggttcaagcgatttttctgcctcagcctcccaaatagctgggattacaggcatccaccaccccgcctggctaattttttgtatttttagtagagatagggtttcaccatgttggctcggctggtcttgaactcctgacctcaggtgatccacctgcgtcggcctcccaaattgctgggattacaggcgtgagccaccacacctggccaaaaatgaattcttgttgagtacttcctatgtgtttagctctgtgcttagatgcttttcctgccttatattattggagaaatccttctattctcccttgttgggatagtactattgctgttttccttggtttggagatgtatattttcttccacgttaatgattccaaacttagggtataccttataatcagtgtggtgtgtttcccccctcaaaagctgtgattaggtacatgttataccatatcacctatcagtgccatcataggattgaggagagaaggtggtattttacattttacagataagtaaagaagtgtcataactcgtccatactttaggaccctgttttatgaagcctgtattgttaattcgatattaatttaactgctgaagttttgttagaactaacggcctagaggtagacttgtggacctttggtttcgctaaaggtagagagccaggagaggacatgcatcctaggtctgcatttggggctttcctctggctgaggaattgcaacagaaatgaggaagggcttcataagtggttatggcaacattctggctgactcgtgggtaactagcatatgaaggaatcattgtcgtcatgacaaattgtgttcctgtttcttgaccacctactgtgccttaggtgcttggcaaacctcctgtgtagttttgacaacacccagcagatggaagaggagttactgtctccaccttatgcatgaggacatttcagcttagagaggttaaaggccttatccattgctacacagctaggaggcagcagagcctttctgccaggcaaaggggtcagtggcagagaaatgggaccctcagggggttttcccccagatcccttccctgttccacagtctcctctctttccccattttcctgcatctggcatctagctcttgaagatagaactcccaggcctggaaatgaccgttgacctttccataggagatgggctttctccagcacctcagcctatctctctgagcctggccagccaacccctatttaaccccttcattctcatctttgttcctgtttactgcagctgccaacagcactgcctcccagtaccccaagctcagtctacagaaatagctccccaagtagctcactgtgcgggctctgtggtcctggcttctaagaaaggcagcagcagggggcccccagcctgtgcgcaggacatgtgacttgctggaaatgccgctggggagggcgggggagagtgtggccgcagaacccacatccttgtttacattggtgaaggggctaccccccttcccgccttcacaacctccacacccccttacccttcaggtctcttcacctccaagaggactggagacaaacatgggccctattttctatctcagagtagcctttctcacagaacactccagggtaggaaggggaaggcagggaaggtgttcttctgacagttcttcagagaggtagactgacagggaagaactcaggagtgttcctgtgtgacctgaccctagccccatgccccagggagatcccatcagagcagtggtcctctggggaaacaaagggaaattcccaaaaccagtggaaatcagacttgcatgatcttcaggcccactttaatttcacagggagaagagctccctggcttacccagcctatccatttgctcagtaaacttttcctgatttcctttactgtatcgggccctgagctgggggtggactttggtgtgaactgccctttgccttctgtgggagcccagtgtggtcgggcagaagtctatgcacacctttgataaatctggtgatagaggtgtcctgggtagtggggaactgtattaaagaacatgttgggccaggcgcggtggctcacacctgtaatccaggcactttgggagtctgaggcgagaggatcgcttgagcccaggaggtcaaggctgcagtgaactatgatcgcgccactgcactccagcctgggcgacagagcgagaccttgtctcaaataaataaataaataaagaacacattggtgtttgagaagtaggcagctgacgaggatggaaggagcgtcctgaagagaaggaacggcatgtgtgaagatcctcaagcgaagcagagggagtgtgtttccttctcgccttagtttgaccaaatctcacgacgcctggactattcgggccacaggctgcccatcctgagttaagctaaagttagttgcatgtgtgtcttatctcttttactagactgtgtgctccccgaaggtaggggcaggattttactcacctctgtcaccttcacagtaccccacattcaggcctccctacggaggaaggaattctgatttactctgtggctactctgtcccaagcccagtggtagttattttatacccgttatctcatttaatccccacaaaaggcctgccatttggttatccctttttttttttttttttttttgagacagagtcttactctgtcgcccaggctggagtgcagtggcatgatctcggctcactgcaacctctgcctcctgggttcaagcgattctcctgcttcagcctcccaagtagctgggattataggcgcccgccaccatgcccggctaatttttgtatttttggtagagacggggttttaccacgttggccaggctggtctcgaactcgtgacctcaagtgatctgcccaccttggcctcccaaagtgctgggataacaggtgtgagcctccacgcctggcctgttatccctctttttcccattttacagatgaggtatatgaggctcagaacacttgggtcacttgcctctggtcactcaactctctagtatctggcagaactgggcttggagcccatttttttttctttcctttttttgtctttgttcccttttttttcagcctacaaaggccatgttgacttgtaggagtcaggaaaactgaattcagagttgactctgtcacagactgactctttgtgaccttggacaaaccacaaactccccctgaacctcagtttcctcatgtggaaagcaaagggggtgtgggaatcaatagcatttgaggccaacctgtggaacttagaatgttgttgatttctctgagtggccacgtgtaccctagacaaagtcatctgcccaagaggcctgtggatgtgttcctctcacctgcactctcttgttcttcaagtctggccctgcctgccatatttttccatgaccccgttctagcctacaagggcaagaactctccaggccttggggtagaaaagggaatttccctggtcccccagttcctcctccccaaaggatgttctatgattcagagctcttctctggcatctctgaccctagctgctgctttcttctgcccccacagctgaccaggtgtatggagaccaggacatgcatgaggttgtgcgaaagcattgcatggactatctggtgagaaaatggaggcctttggggaaggggcagggtgggaggatttcttctccacacagaccttaaccttccaatctattctgcagatgaagaatgccgactacttctccaactatgtcacagaggactttaccacctacattaacaggaagcggaaaaacaattgccatggcaaccacattgagatgcaggccatggcagagatgtacaaccgtcctgtggaggtgtaccagtacagcacaggtacttctgcagtgggtaggtgagggaaagatggtgcctcattcgagcctgcccaacctggcctgctgtggatgctccctccttctctttctctgcagaacccatcaacacattccatgggatacatcaaaacgaggacgaacccattcgtgttagctaccatcggaatatccactataattcagtggtgaatcctaacaaggccaccattggtgtggggctgggcctgccatcattcaaaccaggggtgagtgggtccctgtgcccagaatggctgctggatatagaggtcagaaacctctgttggagtctgttttgcccctaactcacaaaaatatcctgtctcctctctcccctgaggtctcacccttacaaaaaaaaaaaaaaaaaatagggagttacttaaggtgatctctcagggcttgttctttggtcttggtttgcctgtctgagttggcttacctatcttttgtgcccgttgagggctggcattttaggatgtggagtcctattttggagcagtgagccagggcttgctctgggcatcttggcatggatctttctcctgggatcatagtggttacagacagccatggtcacagagacatggggtacaggcctggccccaccactcactggctgtgtgatctaggcagattctgtaagtattccaggctggcagcttggctgatacagaaagcacctcccactgggcctggggcctagtaggtgttcagaaggtggcagtgcattttcccagcacataccgatagattctcattcatttctctctctctctcttacagtcatttgctgaggattttggtatcttctattcaggtttcacttctacaaacacaaagtactcctgcttcattttcggaaacacatagcctaacaccaacacaccctccaacatagggttcttttttgttttgtttttaaataaacttaattttagagcaggtttagatttacagaattactgcaaagaggctgggcacggtggcccacacctgtaatcccagcattttgggaagccgaggctggcagatcacctgaggtcaggggttcaagaccagcctggctaacatggtgaaaccctgtctctactaaaaatacaaaaattagctgggtgtggcagtgggtgcctgtaatcccaactactcttgggaggctgaggcaggagaatcacttgaaactgggaggcagaggttgcagtgagccaagattgtgccactgcactccagcttgggcgacagaatgagactctgtctcaaaaaaaaaaaaaaaagttacaaatatattacagagttcccatatgcctcgctatgattaatgtattaacatagtacatttgtcatagttaatgagccaatatcgacatattattaactaaagaccatacttgactcaaattaccttagtttttccctaatgacctttatctgttccaggatcccatccagggtgccatattatatttagttgttgtgtcccctttatctcctcttggctgtgacagtttctcagaattttcttgttttttgtattcgatctgtttactgactctcgttttgccttttctagaatgtcatataattggaaatgtacagtatgtagctttttcagactggcttttttcacttaacactatgcatttaagattcatctgtgacttgtcctggtttaatggctcattttcttttttggtgggcgggtggagagacagggtctcactctctcacccaggctggagtgcagtggggcaatctaggctcactgtagctagcctccacttccctggctcaagcaagcctctcacctcagcctcccgagtagctgggagactacaggtgctcgccaccatgcccggccagtgttttaaaaaaactttttgtaaaaaaatgaaaaaaaattttttttttttgtagagacaaggtctcactatattgccgaggctgaccttgaactcttgggctcaagtgatccttgtgcctcggcctcccaaagtgctggaattacaggcatgagccactgcacccagcttcctctttttctttcttcaaaaatatgaatgttctggccaggtgcggtggctcacgcctgtaatcccaacactgggaggctgagatgggaggatctcctgaggtcaggagttcgagaccagcctggccaacatgatgaaaccctgtttctactaaaaatacaaaaaaaaattagccgggtgtggtggcacacacctgtaatccgagctacttgggaggccgaggcaggagaatcacttgaacctaggaggcagaggttgcagtgagctgagatttgacccctgcactgcagcctgggtgacggagcgagactctgtctgaaagaaaaaataaaaatgaatgttttaagtttttgtatttaatagacttaattgtttagagcagttttagatttacagaacaattgaggagataatacagaattcccacatatccttctcttcccaaacacagttctgctattattattattattattattattattattattattatcatcttttttttgagacgaagtttctctctcatcacccaggctggagtgcaatggcgcaatcttggctcactgcaacctctgcctcccgggttcaagcaattctcttgcctcagcctcccgagtagctgggattacaggcacccgccaccacgcccagctaatttttgtgtttttagtagagacggggtttcaccatgtcaaaggctggtctcgaactcctgacctcaggtgatccacccatctcggcctcccaaaatgctgggattacaggcgtgagccaacgcgcccagcccagttctgctgttattaacagttcaaatcattatggtacatttgttacaatgtgcgaaccaacattaatactttttttttttttttttttaaggcagagtttctctctgttacccaggctggagtgcaatgaggcgatctcggctcactgcagcctccgccttctgggttcaagcgatttttctgcctcagcctcccaagtagctgggattacaggtgcccaccaccacacctggctaatttttctatttttagtagagacggggtttcaccatgttggccacgctggtctcaaactcctgacctcaggtgatccacccgcctcggcctcccaaagtgctgggattacaggcgtgagccaccatgcccagcctaatacgttactattaaatgaaatctgcatgcctccttaggcccctttatctttgatagtttctcagttttgttttgatgaccttgacagttttaaggagtactgatcaaatattttgtaggaaatgtctcttttggactttttctcatgtttaaactagggttgtgggtcttagggaggaagatcacagaggtaaagtgccattgtcattacatcatttcaagggtttatactatgagtgtcatttatgcctgttggtgttacccttgatcaactggcagaagtagtgtttgttaggtttctccacctaaggttactctttcccaccttttccatactgtactgtgtggaaggaagtcactatgtgcagcccacgcctaagaaatggttatgccccatccccttgagggtagagtatctacatagattatttggaaatctttaaggaggatctgtgtctcatccttaactcatccttaatttattaatttttccagttattacgtacatcaatatggtcttttttttttttttgagagggagtttcgctcttgttgcccaggctggagtgtaagggcgccatctcagctcactgcaacctctgcctcccaggttcaagcgattctcctgcctcagcctcccgagtagctgggattacaggcatgcgccaccacacccagctgttttttgtattgtttagtagagatggggtttcaccatgttgggcaggctgaagtctcgaactcctgacctcaggtgatccaccctcctcggtctcccaaagtgcagggattacaggtgtgagctactgcgcccagctcaatcagccatttctttagagagccctggcatgtattggagactgttaacagaaatcaagacctaggtgttgaatgtgctcttcgatatcaggttgtccatgcttctaggccctgtcagctgatagagcaaggagctacatgtatgtatagtggcctttgtacacatatctataaatatttctacctgtaaccatctgtatttatattaaacatgaatccttactgatgtctccaactcagatccattatcacatgcttcattctagccttctccccttgttcatctgcaaattccctctccaacagtagatacgccatcagatgtatatgcactggttcctaccatccatttatgtaactgctcatttccatatacacgcgtagcagaatcacacttgttcacccgtacccccgtgggaaacaactttatcactatagctcaatgctacatatagttcttttttgcctttggtgttacagactccattcattttgaaagtgacctacttgtacccccacccccttcaaatgagggtgtttatttttattttattttattattattattttttgagacagagtctcgctctgtcgcccaggctggagtgcagtggcgtgatctcggctcacagcaagctccacctcccaggttcacaccattctcctgcctcagcctcccgagaagctggtactacaggtgcctgccaccacacctggctaattttttgtatttttagtaagagacggggtttcaccgtcttagccaggatggtctcaatctcctgacctcgtgatccgcccgcctcggcctcccaaagtgctgggattacaggcgtgagccaccgcgcccggccaaggttgtttcatgtttgtaatacatttgtattattttgtcacatttttgcattctatgctgggatctcagatctcctaattttttatttatttatttttgagacagagtctcactgtcgcccaggctggagtgcagtggtgcgatgatctcaactcaccgcagcctctacctcctgggttcaagcaattctcgtgcctcagcctcccgagtagctggaattacaggcatgcactaccacacctggctaatttttgtatttttagtagagacggggtttcatcatgttgcccaggctggtctcgaactcctgacttcaggtgatctgcctgcctcggcctcccaaagtgctgggattacaggcatgagccaccgcgctggccatagatctcctaatttttattttattttattttatttatttatttattttttgagacagagtcttgctctgtcacccaggctggagtacagtggtgcgatctcggctcactgcaacctcagcctccgtggttcaagtgattctcttgcctctgcctcccgagtagctgggattacaggcacgcgccaccacgcccagctaatttttttgatttttagtagagacaggtttcaccatattggccaggctggtctggaactcctgacctcaggagatccacccaccttggcctcccaaagtgctggaattacaggcatgagccaccgtgcccagccttcctaatttttttttaaatagcatatattaaggtccactctttgtgttgtacattctatgggttttgacaaatgtgtaatgtcatgtatctactattacagtattattcagaatagtttgaccacccttaaaattcctcatactccatatgcttacccctcccttcctccctcttcctgcaaacactattgtctttgtgggttgcctttttcagaatgtcatataattgtaatcatacagtatgtagccttttcatactgtttttttttttttttttttgagacagtgtatcactgttgcccaggctggagtgcagtggcacaatatcactgcagcctttacctcctgggtttaagcaatcctcccacctcagcctcccaagtagctgggaccacaggcacacaccaccatgcctggctaactttaaaaatatttttattttgtagagacaggatctcactgtgttgctcaggccaatctcaaattcctggggacaagtgatcctcccgccttggcctctcaaagtgctggtattgcaggggtgagccacctgcagccaatttgcttttttcccccctgaaattaaaatggtcaatgtgacagactgcttcttttcacttagcagtatgcattaaggtttctccatgttctttcatggcttgttagctggtttctttcttatcacttaatgttccttttatggaggtaccagtttaattattcacctattaaaagacattcttggttgcttccagtttttgatgattatgaataaagcttctgtaatgtgcatgcaggtttttttgtggacgtaattttttagatcagttgtatacatacctgggagcaagattgctggattgcgttgtaagattatgttttgatttatgaggaactgagaaactgtcttcccaagtggctgtattatttgcatgcccaccataatgatttggaagttcctgttgtcagcattaccagcaattgatactgtcattgtgttggattttagccattctcttaggtgtgtagtggtatctcattattttaacttgcagttgcctattggcaaatgctgttgagcatcttttcatatgcttatttgccatctgtatagcttctttggtgaattgtgtttgtgacttcctgacatacaattcctaaaatccttagaatctgcaaagtgttgcctttttgtatgctaatgaggtgactgatggctggcagcctctaggtagcttcaggatgggggctggtgacctgaaagaccaaggcaggattagaggtttgcaactttaagcccatcccccagcctttggggaggggagagaggctgaagattaggttgatcactagtgtccaatggcataatcaataatgcctgcataatgaagcttccaaagaatcccaaaaggattgggttctgggagcttttgggtagctgaatacatggaagtttctagagggtggcaccccagggagggcatggaagctccacgtcccttcccccatatctcactctgtgcatctcatctgtatcctttgtaattttctctataataaactggcagacgtgtttcctgggttttgtgagctgctctagcaagttagttgaacccccaaaaaagtattgtgggaatcccaatttatagctggtcagtcagaaattctggaggcccagactttcgactggtgttcgaagggggttggggggagtcttgtgggactgagccctcaacctgtgggatcccaggctgtctctgggtattgaattgcattggaggatggacaccaggtgtccgctgcttgctgtgtgggaaaacaccctccccccagcccgcacacttggtcacagaagtctcctgtgttgattgttgttgagtgagagtagaaaaaacacttggagtgtgtttaacactgccagagtggttagattttttgactatttttttaattggcttgttctaacatagttttacgaattgtttttaactattcacagtaaaaaattacattttatctgaatgcaaggtctgcaggaaaaagaaaagaatacattttacatgattacttagcatatatgcatttgtgtgtgatgtgtatatgtgcattaaaataatgttaactaaagcttcatgaaacaacatttgcacttattccctgggatatattctgatattttctattttttaaaaatgctgttggatctcagcctgaaaaacagtactctgatgtagtgtcctgtaactcatagcaccccacaccatgttgatactgcccccttattccctcacacacccactacttcccccaacccctcacatgcttgaatactccctccacccggtgcacacatagctaatttttgtatgtgtctcatctgctcatgtgtgtgaaagtcctcaacattatgaaacagtcatcactggatggggcttctttaaattaaggcccagggccaggtgcagtggctcacacctataatcccagcactttgggaggccgagtcgggtggatcacctgaggtcaggagttcaaggccagcctggccaacatggtgaaaccccatttctactaaaaatacaaaaaagttagccgggggtggtggcactcacctgtaatcccagctacttgggaggctgaggctggagaatcccttgaacctgggaggcggaggttgcagtgagccgagattaccccactgcactccagcctgggcgacagagcgatacttcgtctcagaaaaaaaaaaaaaataagtcccaggttggaaggcacctgactgctccagtctcagtgcctcagttgaggtggtttgggggttagagtcaggtcttacaagcataggagtttggaatgacaggtcccacatcccaagcctgctttcccctggtccccaatcaagaggtagtctgtggagtgttgctctttgggagtacctgctttcctgtctccttttttttctggggcctgtgggcctacctcgctgagcctgttctggctcttgggcaggttcagtgtgttattgcacatccctgttcctctccctccttgcagtttgcagagcagtctctgatgaagaatgccataaaaacatcggaggagtcatggattgaacagcagatgctagaagacaagaaacgggccacagactgggaggccacaaatgaagccatcgaggagcaggtggctcgggaatcctacctgcagtggttgcgggatcaggagaaacaggctcgccaggtccgaggccccagccaggtgggtcatggactctgtcacaggcttggccaaaaactcattacttctcatgctttgccctcaagcgagcagaaaaaaattaagcagttttgacatctgggagggaaggaagcatccagcaccatctgtaactcatcttggtcttagttttggcattgtaccttggaactttaaatacttgtgcagaacaggcacttaaggagtgagaggagggcagccatgctgctggtgacacgagaataatggatagcttcagagacacaagcttttgttgactgcccttgtgtgccaggtctctactgagaatgtaacatcagatctggactactctgccctcaacgatctcgtctgttggcagagacaactcaatggtggggtccttgaccctgactgggagatcagtggaggtgggggctccggttagtcttcacagaggaaggttgaattgttaggggagcggggaggggcggggcagacaagcatctgaggaattgtaaaatcgcaaggagtttggagtgattgtagatgttggctggcaggagctgagttttttttttttttttttttggagacagagtcttgctctgtcgcccaggctggagtgcagtggcgcagtctcggctcactgcaagctccgcctcccaggttgatgccattctcctgcctcagcctgcggagtaactaggactacaggcgcccaccaccacgcctggctaattttttgtatttttagtagagacggggtttcaccgtgttagccaggatggtctccatctcctgacctcgtgatccgaccacctcggcctcccaaagtgctgggattacaggcgtgagccaccgcacccggctgaaggagctgagttttattccacaaatacctactaccagtctgtggcaggccctgttttcagtatatggggatacataggtgagcccagcagaccaagatccccgtccttgtgatgttcacagttttgcagagtgaaataaaataataaatataatgaataaattagttgggaagtgctatggatggaaagtgtagagccaggataaaggggctgagcaggaatgtgcgttcacggtatgaaatagcgcagtcagggtaggcctcagagcaggtgagatttgagccttgcagaaggtgagagttagctgagcgcacatggaggggaggacagcaggcccacacacctggtacaactcaggcacagcccagagggaggccggtgtatccgaacagaatgtagtagtagatgaagtcagagaggttgtgggtccaattgggtaggggcttgtgggctgtggcgaggactttggcatttactctcagagaggcagaaaccatgggaggattgtgagcagaggacggacaggatgtggttggggatttaataagatcgccttgcctgctagtcatccagtggagtctggtgagtgagggcagaagcaggggccagtgaggaggaggctactgcagtaggccaggtgactggtggccagtgctggcagtggagttggtgagaaggggttggatttgagatctattttcaagatagaggtaacagggtttcctgtcagattggctgtaggggtgtgagagaaagggtaaggagctccacctctgtcctgtgaggagtcttgtggtccaccgtgtgagtggggatgatgttgacctacatagaagctgtatcatagccaaggtcctgggaagggagccagcattcagggatgggtcacaagaaggtcatggctgctggtggtccttaacgcatttaccttccccgctgcagccccggaaagccagcgccacatgcagttcggccacagcagcagcctccagtggcctggaggagtggactagccggtccccgcggcagcggagttcagcctcgtcacctgagcaccctgagctgcatgctgaattgggcatgaagcccccttccccaggcactgttttagctcttgccaaacctccttcgccctgtgcgccaggtcagtgacttgcccacagggaatgtgctgggagttaggaggcacgtcctgggtcctgggtcctggatcctgggtccctacctttgactgtccgtctgcttcaggtacaagcagtcagttctcggcaggggccgaccgggcaacttccccccttgtgtccctctaccctgctttggagtgccgggccctcattcagcagatgtccccctctgcctttggtaagcctcctttgtctggggggatggaggctgctaggagctgggagagactggaagaagtggcaagtcctgagaggggctttctggagcctctggccatctccccaagaaaagaagggagaggcactggaggggatttttcagatccaaggaatttgccccagaagggtctggggtctaagtggggtttcacaggcctagcagatccttctgttttgagaaaggagtgagaagggccctatgggatttctccagagccccagatgtcggcacagggtgaggagaaggcaggctgagagcgctccatcatccttttcctcttcctctcgcccagcaggtctgaatgactgggatgatgatgagatcctagcttcggtgctggcagtgtcccaacaggaatacctagacagtatgaagaaaaacaaagtgcacagagacccgcccccagacaagagttgatggagacccagggattggacaccatctcccaaccccagtactcctgctctccggtgccacctcaccttctttggcttcttccctcttgcctccttctgttctttctgctctcccctcttttccctcctcctcacttccctctggctagcccacccctgcactctctctcattgccgctgccactatcacctgtctctctgccagctgatgtgccctgttgccccccaccccatcccgcacagaaccatccctgcattccacaggggactcgggcaagggtgccgaagatagacaagaggcacacagagacagaccaactggcagccaggcagccccagaggagagagacattcagacagaggaaagtctccctgcccctcattccttccaagatgagaaaaacttgccgccaccccccgacactgatgccagggaggtgggaggaagaagtgggaaatttcccttcccagtacccccaagaacgtctgagccttcaatgttgaattttttctttattaaaattacttttatcttataaaatcaactaatcaaaaatgatatagacgacagcactggctctgtgaaggtggcatctttctgggcaggcaggccatggggcatggaggagggtgcaaagatatgggttgctgtcttctggcctccagctgcatggaggccggcccagggtctagggtgtgcactgggcaagggcagggcggcaggtgtcaggccggcttggacaatgaaaccctgaccttgctgcattccttttgcttccaccaccactagcttctttggaatcttggggtgggggtcatctttggggattatggctgccacccgggatttgagtgtagggagtgtgggagcagccttggcagatggggcacccgtgccctgcaggtgttgacaagatccgccatctgtaatgtccttggcacaataaaaccaaatgtcagtttccctgagcgactctgttctgtgtggggcaggggttgggcgggcctctgggcagaggatgcaatggcacggaccttggcttgacctcagaggtgtgaatgctctccagcagggtctgtctgggggcctggagtttgtatttgatttgctgcttattaaacctccttctggacctattgccactggaaaa

SEQ ID NO: 600 - DNA, 603 bp, Homo sapiens
gttcaagttggaatcctggaggggaggtgtttttcctgtcgtacgtgggacaggccacgctgtccgtccgcagtaccgacgcctgcaggtcagagcttcggggagaaaagtgaagagcaagacggaactgacggggagaaaggctgggaaccagggtgtcgactttgactgaaatttgagacggagggcaccggagggcgagcactcgcctgtgattggcccgtgggcgtcgtcgaggtcccacgcagctgctcaattggttggtgttgcaattgttgtggcggcggcggcggcgattttgcccacgtacttccgagtaaggggcggggctgtgccctggcgcgcgtgcgcagcgccccggggccccacccggtagtgcaagaacctgcgagggggcggagcgaagaggtgcttgttttggttctgtttcctttgaagcagaaggccggaacaagcgtagcaataaacttgctggacttggagagaaggctaagacaaactcgccgcactgccttcatcttggactttacatccgggttctcctctcggcgtgacccgcgcgccgccaccgccgccgccgccgccgccgccgcctccgccgcc

SEQ ID NO: 601 - DNA, 396 bp, Homo sapiens
atctactaagattgtcctgagtgagagtcttatctcctgtagagagagagcagaaattgtggaaaaacagagacaagctctgatcatgtgagtggctgacctgcaatgaaacgtgcctgcacagcctcaccaggtgtctactgttaaagtgagggcatttattggaaaagaatgggacactgtgacttggaatggggatgtgtgggaggaccctgacaaagctgggaacactgagtttgtaaactctgatgaaacttttttgccagaagaaacagcttccccatccccagtagtggcaaccaccactccctgacccttgctgccatcagcctttccacctttgtctgaggagataaaccctgcactacctgaggcaaaagtgatggcctgccttga

SEQ ID NO: 602 - DNA, 188 bp, Homo sapiens
cacacctataatcccagcactttgggaggctgaggcaggcagatcacaaggtcaggagatcgagaccatcctggctaacacggtgaaaccctgtctctactaaaaatacaaaaaattagccaggcatggtggcacacaactgtaatcccagctacttgggaggctgaggcaggagaatcacttgaatc

SEQ ID NO: 603 - DNA, 292 bp, Homo sapiens
caaagataacctagaactcctcctgatgaaccattacatcaaaccagggctgaaaaacaacttcaaagaaacggcatttgatattgccaggaggacaagtatctatcactccttctttgtaatggtggaaggctatacaaattcttcacctcagtcttaatggttctagtaattttaggtgtctaagtaccagtggctccttcgtgcaagatataaaatattcccataagacaaagttgatttaaaacgtcttactacaaaaattcagtggtaaggtagttactattatgtt

SEQ ID NO: 604 - DNA, 292 bp, Homo sapiens; identical to SEQ ID NO: 603

SEQ ID NO: 605 - DNA, 292 bp, Homo sapiens; identical to SEQ ID NO: 603

SEQ ID NO: 606 - DNA, 382 bp, Homo sapiens
gaccaccctcatgatccagtcgcctcccaccaggccccacctccaacattggagattataatttgacatgatatttggtggggatacagattcaaaccatatcagtcacatatctctgtttctccaagattggtccttgctaccttgtttagttcatttggtgaggtcatgttttcctggatggtcttgatacttgcggatgtttgttggtgtctgggcattgaagagtcaggtatttactgtagtctttgcagtctagactttttttttacccactcttcttaggaaggctttccaggtatttgaacttgggtattgagatctaagccgtgtctgccttagggggcatcccaagcccagtaacctgtggttcttgcggatt

SEQ ID NO: 607 - DNA, 90 bp, Homo sapiens
tttgggaggccgaggcaggcagatcacttgaggtcaggagttcgagaccagcctggccaacatggtgaaaccctgtctctactaaaaata

SEQ ID NO: 608 - DNA, 90 bp, Homo sapiens; identical to SEQ ID NO: 607

SEQ ID NO: 609 - DNA, 90 bp, Homo sapiens; identical to SEQ ID NO: 607

SEQ ID NO: 610 - DNA, 382 bp, Homo sapiens
gaccaccctcatgatccagtcgcctcccaccaggccccacctccaacattggagattataatttgacatgatatttggtggggatacagattcaaaccatatcagtcacatatctctgtttctccaagattggtccttgctaccttgtttagttcatttggtgaggtcatgttttcctggatggtcttgatacttgcggatgtttgttggtgtctgggcattgaagagtcaggtatttactgtagtctttgcagtctagactttttttttacccactcttcttaggaaggctttccaggtatttgaacttgggtattgagatctaagccgtgtctgccttagggggcaccccaagcccagtaacctgtggttcttgcggatt

SEQ ID NO: 611 - DNA, 310 bp, Homo sapiens
cagcaatcctattctttgcttctggtaatttattaatttacattaatgtcatttaattatttacttcaggtagatttacatctgctatatttttacatgaaaaagatgaaaagccacttgaacatatcttctgtttttttaatgatctgttcttctttataggggatttttgacatcttgtgaagcagaactacaggagctcatgaaacagattgacataatggtggctcataaaaaatctgaatgggaaggacgtacacatgctctagaaacttgcttgaaaatccgtgaacaggaacttaagagtctt

SEQ ID NO: 612 - DNA, 424 bp, Homo sapiens
ttttgataagaattgtactgataatagcaaagatatgtaatcaacccaaacgcccaacctaactgctatgttattcctattccaatactttgcaatatatgtagctttttagaaagaggatatgttagcagggcgcagtggctcacacctgtaatcccagcactttgggaggctgaggcaggtggattgcctgaggtcaggagttagagaccagcctggacaacatggtgaaaccccgtgtctactaaaagtacaaaaattagcagggggtggtggcaggcacctgtaatcccagctactcaggaggctgaggtaggagaatcacttgaacccaggaggtggaggttgcagtaagccgaggtcacgccattgcactccagcctgggcgacagagcgagactccgtctcaaaaaaaaaagaaaaa

SEQ ID NO: 613 - DNA, 406 bp, Homo sapiens
ttttgataagaattgtactgataatagcaaagatatgtaatcaacccaaatgcccaacctaactgctatgttattcctattccaatactttgcaatatatgtagctttttagaaagaggatatgttagcagggcgcagtggctcacacctgtaatcccagcactttgggaggctgaggcaggtggattgcctgaggtcaggagttagagaccagcctggacaacatggtgaaaccccgtgtctactaaaagtacaaaaattagcagggggtggtggcaggcacctgtaatcccagctactcaggaggctgaggtaggagaatcacttgaacccaggaggtggaggttgcagtaagccgaggtcacgccattgcactcaagcctgggcaacagagtgagactccaat

SEQ ID NO: 614 - DNA, 406 bp, Homo sapiens
ggttgtttgtgcttttggtgtcatgtgtgtgtataaaatgtcttattcttctttaaaaaggttcagtgtttggttttaaatcaggctgtgtccctttcatctgtctgacattcttgtcaccatgtcaggctgccttcagctagtaatacttcattaaattcaaaagacaaaattgttttaaaagaaaaaaaatccagtttggagaagaaaaaactgttgtctaatttaaggtcatgagatttactctcatgtttttgtgtaagagtcttatcgttttggctcttacatttaggtatttgacatattttgcatcaattcttataatcgtgtgagatgtagggggtccaccttcattattttgcacatagatgttcagttgttccagcaccatttaaaaaaaaaaaaa

SEQ ID NO: 615 - DNA, 404 bp, Homo sapiens
ggttgtttgtgcttttggtgtcatgtgtgtgtataaaatgtcttactcttctttaaaaaggttcagtgtttggttttaaatcaggctgtgtccctttcatctgtctgacattcttgtcaccatgtcaggctgccttcagctagtaatacttcattaaattcaaaagacaaaattgttttaaaagaaaaaaaatccagtttggagaagaaaaaactgttgtctaatttaaggtcatgagatttactcccatgtgtttgtctaagagtcttatcattttggctcttacatttaggtatttgacatattttgcatcaattcttataattgtgtgagatgtagggggtccaccttcattatgttgcacatagatgttcagttgttccagcaccatttaaaaaaaaaaa

SEQ ID NO: 616 - DNA, 302 bp, Homo sapiens
aaggattggtgttaattcttctgtaagtatttggtagattcaccagtgaggctgcctgctggtcttcagcttttcttagtggaaagttttttgattactacctcaatctctttacttgacataggtctgtctattcagattttctgtttttttctcaagtcagattcagtagttcatatctttctggtaatgtgtctttcatccagcttatccaattattagcatatattgtttatatgtataatccttttcatcatattataatcctttatgtctctaagaacaatagtaatgtcccctct

SEQ ID NO: 617 - DNA, 168 bp, Homo sapiens
gggcggcgcgcggcgtgcaggtcgcagctgtggctcgggtgctggcaggtgctggcgggactggcggggatcgccgtggactgcctcaggggcgccgcagcccgctcggcccgagggcccgcctaaccgcgccgcccgcgcccgctcctcctcggcccgcgcccggag

SEQ ID NO: 618 - DNA, 168 bp, Homo sapiens; identical to SEQ ID NO: 617

SEQ ID NO: 619 - DNA, 1526 bp, Homo sapiens
tttgggtatttcattatgagttaacatatttattctcatgaacttcttatgaaataagtttggttgtcatctccacttgacggatgaggaccctgaggtgaagaaacttgcccaaggtcacagctagtgagcagcagatccatgattccaaatccaggctgtttaaccccagaggctttgcttttaactgtgccatttttctgcttcttgcaagttgagactgaagagagccatgaagaagactcttactggggactctgaaatgacaccttagccgggggaggagtggagccttgagagtgagggcagttgagtactcgggtctgggacttagagcttccaagatttctaccacctcccactcccctcgggtttgtaaagctgcctccatttgcattgggagtgcgggggggctgcctgggggactgtggcgattgtcctcaggctattggctgagagtggtatgccactgacttattcctccaagagacatttccagtaccctccatccctgccccctgtactacacactggtgaccttccccctcaaaaacaaaactcaaactctgtccctgatgctcatggtctactgaaaacagaattacagctgtctgtgaatgacctctgaccaagctggggggacacagagaagggacttgtgacttgctttgccagggaggtcctgagaggctgtccagggaaggtgacattgaggccgggacttgagctggctgtttgaaggcaggaaaaatggcagggcaaggactggagtccttcgccttcctgggggacgtttattccacatgcctcgggaaatctgaaatggccttggagagcatttgctgggggttgggggtgggcggaaggggacagagagcattgccaccgacaggcggggcgtcccagggcctctccccaggagcggatgagctcagacgcggctcactcagctgtgtccaggcacagccggtttatgacctaagagaatgacaacccaggagcaagtcgggatgacaaagacgcccagaagggcacgcgcttttatgtaaccgacctctgagctggcggatctcaggaggttggcgctctgagctcaggcgcggagaaaggacggcgcccctgccttactctcttataagtacgaggggacagcaacgcgacataacttagagaagtccaggaagctttagagagcagggcggtcccgctgctattcctcagagcgcgactggggcgaactggggcgcccttcccagctccagctcggcccttgtcccctcttcccaggatcactcgctgggtgaccttgggcgagccacttgacttctctgagccccagtttcccagtccgtgcatctgaaaggctgtaatagcgtcgtggggctccccactcggccctcagggccaaaggtgggcgccggacacgcgggaggggcccttggacgcaccccctctcgcaaacgcccggttagtcccggcggactcgcagtggagagcggccccaggaggcggcgggcggcggggcg

SEQ ID NO: 620 - DNA, 1526 bp, Homo sapiens; identical to SEQ ID NO: 619

SEQ ID NO: 621 - DNA, 356 bp, Homo sapiens
atgcttaccttctttaaatacacataaggaatcttctttattttcactataaatctgttataatggaaactctgattttatatttctctgtaatggagtcaactatcacctggcctatgcaggcaagtgcaaagaggtgacagtttttatttgtgccataaccacacacagctttaaatgtttttactataacatattttagaaagctaacaagctagagagagcggtgaagggctctctcagcatgttcctctctgtctgtgtgttagttttgctttactttttctttaatctgtgtctgtgtgtgtgtgtttgtgtatgtgtatgagagagagagagcgaaagagtcttatttt

SEQ ID NO: 622 - DNA, 356 bp, Homo sapiens; identical to SEQ ID NO: 621

SEQ ID NO: 623 - DNA, 356 bp, Homo sapiens; identical to SEQ ID NO: 621

SEQ ID NO: 624 - DNA, 370 bp, Homo sapiens
tttacttgggtatcccctccataaatggatgtcaaacttcaatgtatgtaagtgtcaattgccagttatatctattaggaaatacagattggctgggcgcggtggctcacgcctgttatcccagcactttgggaggccaaggcgggcggatcacgaggtcaggagatcgagaccattctggctaacatggtgaaaccccacctctactaaaaatacaaaaaataagccaggcgcagtggtgggtgcctgtagtcccagctactcgggaggctgaggcaggagaatggcgtgaacccgggaggtggagcttgcagtgagcagagacagcgctactgcactctggcctgcaaaagagcaagattttttttcc

SEQ ID NO: 625 - DNA, 301 bp, Homo sapiens
atttcatcacccaggtattaagcccagtacccactagttatttttcctgaccctttcccttctcccaccttccaccctttgaaagtccccagtgtgttgttcccctctatgtgtccatgggttctcatcatttaactcccacttataagtgagaacatgtggtatttatttttctgtttcaacattagcttgccaagaataatggtcttcatctccatccatgtccctgcaaacaacatagtctcatcattttttacgactgtgtagtattccaaggtgtacatgtaccacattttcttca

SEQ ID NO: 626 - DNA, 301 bp, Homo sapiens; identical to SEQ ID NO: 625

SEQ ID NO: 627 - DNA, 297 bp, Homo sapiens
atttcatcacccaggtattaagcccagtacccactagttatttttcctgaccctttcccttctcccaccttccaccctttgaaagtcccagtgtgttgttcccctctatgtgtccatgggttctcatcatttaactcccacttataagtgagaacatgtggtatttatttttctgtttcaacattagcttgccaagaataatggtcttcatctccatccatgtccctgcaaacaacatagtctcatcattttttacgactgtgtagtattccaaaggtgtacatggtaccacatttt

SEQ ID NO: 628 - DNA, 358 bp, Homo sapiens
tttacttgggtatcccctccataaatggatgtcaaacttcaatgtatgtaagtgtcaattgccagttatatctattaggaaatacagattggctgggcgcggtggctcacgcctgttatcccagcactttgggaggccaaggcgggcggatcacgaggtcaggagatcgagaccattctggctaacatggtgaaaccccacctctactaaaaatacaaaaaataagccaggcgcagtggtgggtgcctgtagtcccagctactcgggaggctgaggcaggagaatggcgtgaacccgggaggtggagcttgcagtgagcagagacagcgctactgcactctggcctgggcaaaagagc

SEQ ID NO: 629 - DNA, 12192 bp, Homo sapiens
ccggttcaagagcaattataaaaatttattagattctttttaacagaagaatctacaacaaaattttcccataaatatgtttacataaagaactcaaattatttagcctcgatttcgttagacttgctaccttgatttttgttagcctagatgttgttttccacagatgtagaaagtaattctgttgacaacagttggtcctattaaagtagatggacattccacgacaaaacattattcactcaaaaaatgcgttaacatatatttctcattcaaaagggatctgaaccaattgagaggtagctgaagagagaattactcataaaagtccaattccttatctatgaggcttctttagctcaaagttaaagaaggcagcacacatgtttcactgttttggttgtctttcagaaaggtaccatggcttcctggaatgaaaacaggcctagaaaaataataataaagcttagccaccaagaagttctttcctactcaaaagatgggtactttcaggcagagagggtcaatgccatcgaaactcatacagtgtatctctgatgcaaattaagtaatcttaggactacttacatatcagattatttacatgtaggatctaattccttattcaaaagtcaacttaaaaactcttcttgcaaaaggatttaaataacagttcactgaagctcctcccttgttgcatgagatgactttacatacagctaagattgctacatgataaatatggaatgttggccagacgcagtggctcatgcctgtaatcccaacactttgggaggctgaggcaggtggatcacctgaggtcaggagttcaagactagcctgaccaacaaggtgaaaccccatctctactaaaaatacaaaaactagctgggtgtggtgtcaggtaggtgcctgtagtctcagctactcgggaagccgagataggagaattgcttgaacctgggaggcagaggctgcagtgagccaagatcgtgccactgcactccagcatgggtgacagtgggagactctgtctcaaaaaaataaaaaataaatatatatatatggagtgttacctcagaatctagtattgaatatgtctacttttaataacacaaggtaactgctttggcagcatgtgttcctagtagctagtcactcgacaataaaacatcagtaatctggtagtttaagaaggtttaaaaagcccaatcaaggcctactcttgtaatcttgaataaaatacttcagattaaaatatgtaacatttccaggattcacaattgtaaacgatcattccaaacgagcacaacaatctcttagcattctcagaatgtgactataaaaaagatttattgtttaagttccctatctcgatatctcattcagtgccgggaagcaatgatagcgactctacacatttccatgctcatttccaggggacaaccatggttgccaagttaaagcagtaggaacaagtatgagtcctctaaagtaatagtctacgttaaaaatgaaggcatagccctagatggggcagctcagtaagatgcaaggtacaatccactaaccaaaaaatcagaaagctaagaatatgtataaaacccattagctttgaaacttaaaaatatatccatatccacagacagaaactttggtctttttaaagtgaccttcacaaatcagttttgtgtttgtttccattttctttcacagtttaagcctcaatcaaatcagcagtctctagggattttgaaatcgctatagattaaaatcctctctgactcaactgtttgactaacgccgagtatttaataattctacttgagagagaatttttggacaaaatcctgccatgcgctgtcttcagatgctccccagctgcactataaagcaaggcatcactgtccttattttatcacttgacttagagacgagaaaatatatcactacagacaattctaccatttagtaggcctggctgaaaagttttataatactaatggagcaacgatcacctataaaggcaaagatctccttctctgtactaatgatacatattcatagcttgtttccaaggataggaaattaataactgtgatagatagaccagggttaagttaatgaatttttaaacttgatgcttttgataataaaatcattcaagctatagcatttggactgtctcctctctactcccacagattaggcactttgatactcaacaggttgagtaaattgaatccatagattgtatttacgttctctgtcaaggttgcttctccacatttcagtgatcaaaggcaaaacagtcatcaaccctgtagccttcaatactatgttcattacatttaatcaagtgccaactccactgcatcattcaccaaccttaggaatgcttaaaagcatggcattgttcagcaagaaatataggcacagtactgtattaaaatgcacacacaccacaaaacaaaaaaacagagaggaaagcaaataaatgtcatcctctacattgtgcgagaaaattagttaaaaatgcacaggactgcccaataaatatttcagaggtggttttctacctgaggcagcatcaatcactgtggaaactccccttcgatcagagactggacgggatgaccctggcatgctgacggggtcagagcggactggctggatcctgcaatgcaatttaatttaattcacatatgttactggcatcaaaactgtcacttgctacaaatgaccttaaatcaggaatgctggagtagcacaatccattaaagaaccatccattctaaaacaagacaaacaggggagctgcagtccctaattgctgcacaaggataaaacactacaaatattctctacactctggaccccttctaacttatctttgtgtgttattccatagatttttaaggaagggactgaaaagctgacattaatttaaagggatacaataagtagaatgggagaggaaattaaacactgaaaatgtttatactgaaacctttgggatttccaagggacacacatgaagagttttgagaatcctgaaattcactaatatcaccatagctattaatgtgttccataaaaggcagcaatgtgtaatttcaaattttgagatgctccattaaaatgctcaatgaaagttactttatatctgacagtaagcataggataacaaagatgtactgtggccggggtgggtcactactaactgagctacctttataaaattaccaactagcatacaacaatcaattagaacctcagtaaacgtgcaaattactacacacaatttaaagttgcttaagaataataaacatccatcctggctaacacggtgaagccccgtctctactaaaaatgcaaaaattagccgggtgtggtggcatgcacctatagtcccagctactcaagaggctgaggcaggagaactgctggaacccaaaaaccagaggttgcaatgagccaagatcgtgccactgcactccagcctgggtgacagagcaagactccgtctcaaaaaaaaaaaaaaaagaataataaacatataaatgccaaatgccgagtgtctctttctagctgcattagaataaatactattaacataaaagtatctggaagattaaaagatctgaaagtcccaggcaacttagtgaaacaaaaacttattacaacaatatatgcatgcatttctggtaattcattcatacagtaagtatttactgaatattaattgcttgtaggcattactctgagaacaagcagaaacaaaacataaaatacagaccaatgtgtatatatatgacatagcacatgaacattcatgacaatgcaaaataaaactaaagtgtaaatatgaatgacataaatagtaaaagctcagattgaggagatgggggaatacatgcagggtccacatcagttagagatcttgcagagctggaacagggattaggtctgtatatagtaatagtatatacgcataatgaagaggagcaagaaatgccctttaagcacaggactacaacatatagaaacttagattagtgactgaatacgatagattcagggcatcttgaagtgcatgatttggctgaagtatagagttcataaaggctattgatggaagataaaaagttgataagaaacatgggacagatgacagaagcctgaaatgccaagtatgaactgcagactagttatgaaatgcatgcttttgttgtgaggaagaaaaaacaggagggaggtataggatgatctattaccggaaggtgaaaatactgattaacaaatattgatcactgctatgtaggactacccaatattcattccaccccagctaatttttctaagccaatcatggtaatctcatcacatctcggcagtggttagttaggggataggtaagcctaagctaatgtgggccagttagaaaagagaagtttatttaaagtgtctggaaaagaagtttccttgttcttgagagcaacaaaaagctagcctcttagatatggtcagtccattcaaaattatgcccccttctagtctaaacaacttcctatgtgggctaatacaactcctatagttagtcaatttatattggggtttctgaataatccagagttggaggtagggtgtgaatggggctacagatgaagcaagattggccatgacttgatagctgaagctggacaacagatatatgggggtttatgctatttttctttttattttatacatgtttgaattttcttcataattaaaaaaagagaaaaactggttgggatgatggaaacgttctgaaattagtgggatggatgccaaacatagtgaatatactaaaacccactgacttgtacattttaaaactggtaaatttcatgttatgtgaattatatctcagttaaataaaataaaataaatgataaccaatttctgaggagctaatcgagtggaaagagaggctttgcatactcagcatcttttacattatatgtttctcaggtctgttagcaaatatttcattgcccattctttttaaacacctgctctgtgtagggagcttgcctgattcccttatggatgagagtcaacactatgcctgcctgtttcccattttggttaggcggcagggaggaagattatcactgcactacatattattattggtatcctatggggtacaggacagtgtactaggtgtcaagggtcaggtgagccccaaaaaatctaaacaaggacttcacaatttaagagagaaagtaaagccaatggtcggccataggccaccatgcacaggcgtgtagaaatcagatgagagacaaggagctgggctagagtgatcataaacgagaatgaggagaatctcaatagttgggtttctaattggatgccgggtgggaaatggtggtactaaaaaggacttaaaattgatgtgaataaaatctatatttcccataaaaactgctgtagggtcttagccaaggtcccaaccaagcttacctgctgaaagtttaaaatataaattacaaatgcaattaacagaaatttataaacctgctgctcagtataaaggtttctaaaggttatatgtgtcctgtaaacaggataatattctaatcaaacataaacaatttaaagtcatttagatttaaacaaaatttggggagttatttattattattaacaaagggaaagtctgcgaggaaaattcttaaggattctgaaaagtagctatatctgcttttaaaagaagcgagttagaattatcttaatagaaggactatacctgaggaaaagagtaacaaagaaagctgaggaggccacgaaacaatggggcaaagacatcctcagaaaaagtacagcacagggctttataaatagcagctggtcaatcactagaaaaaaaatgagacagtgtcttgtgcacggtttagcaaaaaaactaaatgtgttatatagttgtgaagagaataaattggttacttattttaaacgctttattattaagatttaaataaccaaatgactgttgtaaacacgagtacactgaatcactaagttgaggactgcaaagaattgactccctgatcatggcttcaggtcctaatctagaccatatttaatcaattagcatcactgaaaattggtctgacactctcactgtattctgtcattattacctgacatcttggtcaaaaaatgtcatttttagaaagctggaggaattatgctggaacaaaaaaaatgcagagaagaaaaaaacaaaatacaaagcagagtaaacaaaaaatactaaacaaggtattaaaagaagatacattcttcttgatgaatcgttctttttttgtgtgttggtttgtttgttgttttgagacggagtctcactctgttgcccaggctagaatgcagtggcacgatctcggctcactgaaatctccgcctcctgtgttcaagcaattctcctgccgcagcctcccgagtagctgggatcacaggtgtgcaccaccatgcccggctaattttttgtattttttgtatttttttggtagggttttgatggggtttcatcatgttggccaggctggtctcgaactcctgacctcatgatccaccctcctcagcctcccaaagtgctgggattacaggcgtgagccaccacgcctggctgaatcattctttaagaagatacatcagtcaggggaaagcaaaaatgtaaaaagggacagcagttaggagtctgtgagatgttgctagggtgctggcattaggaatggagaggagtggaaggtttctagatgtattttgaatagaaatgacataagttggtgaagaattagatgtggcatctgtgaaaggagagatttcaaggataacctctagattctgtcttgagtaggtagtttgtggagtaatttaaagagatgaggccaggtgcagtggctcacgcctgtagtccccacactttgggaggcagaggcgggcagatcacctgaggtcaggagttcaagaccagcctggccaacatagtgaaactccatctctactaaaaacacaaaaactagggaggcgtggtgccacatacctgtaatactagctactcaggaggttgaggtaggagaatcgcttgaatacaggaggctagaatacattctagatgttgcagtgaactgagatcgcaccacagcactccagcccaggtgacagagtgggactcagtctcaaaaaaaaaaaaaaaaaaaaaaaaaaatactcatgcctgtaatcccagcattttgggaggccaaggcgggaggatcacttgaggtaaggagttcaagaccagcctggccaaaatgttgaaaccccgtctctactaataatacaaaaattagctgggtctggtggcgggcgcctgtcatcccagctactcaagagcctaaggcaggagaactgcttgaacccaggagacagaggttgcagtgagcagagatcacaccattgcactccagcctgagtgacagagcaagactccgtctcaaaaaataaaataaaaaataaataaaataaaatagagatgacaaagaataggggtgagagcaggattagggagtgagatgaagagttgcaattcagacccaagtaggcagccggccgtactctaggcttatctcctggcacctcctggcaggtactcagtaaatatgtgtcatattttctaaacagatacatcaggcataatccaactttgcaacaattttcatcttgttataaaaattttttattgttactgacaaagaagacaaaaacgtatttccactatgtaactggaacattttttcccactattttttaaaaggtgtgcaagaaaaaggtcagagggttgttttatattcaattcaagatatactatagagttttttttaaagagaagacaagaaaagggagattatattacattagactgagtccttcattatctgttgcaccctaatgtgtcaagtcttggtataacaaattaaactgctaagcaaacttgagactgcaagtcaaaactgtctgagttgcaattaaaaaaaaaagctaataataaaaagcataatttgtacacctgtcctaggattcctacaaataaggatgagagaacatgtattataaaaatatagaagataaactataattgaatttataccaacgtttttccatccaaaaactttatataatctaaaagaagggagatacaggattagataaaaatcacagatgaaatttaattgaaaggtggtgccaacttcagaaagatcaggaaaagaatacataatcagattcaagcagttagaaatataagcaaagcatcaaaaagtggaattgcttgaaaagtgcagtgactattagatttagggagaatataatctgaaaagcaagtatttattgcacgtaatgtgatcccacgagaccctatataccatctcaagtaatgacagggaattacgtgcaacagtacatgtagtctgcaacatgatactgtgccaaaaggggaaacctaaatattacatatgatgctcatttcacacgaacatattaatccttttgttcaaatcactccctaattctcatttcctacctgagactgttgagatcaagatcatctgtatcaaaatccaaaagaggctgtggcgtgtcactcggaccatgagactgcaacacagatgaactggatgagataactgtggtttggcctgagggatggatggttttgaactggaactgtggacccatccacagacgtctatggggtccagtgtgtgttacaatttcaacctggaatggagtagcaatgatgatttaaatggtttgtgatcctgatttgagagacttcacaatcccccattcttcctcttaacacccacattcttcaagaagcccatgttaaagtggcaaagggataggacacccataattaaaaggtgatgataatcacagctgatgtagacattcaaaatatccctctactgcttttcatcaacataagccaaaaatacattttgtgtacatatacatacacagacacacatgcacacctcacacacatatacaagacaaaaatcacatgaaagtaaaaggaccagttgcttgcctcatataactagtgtcagctccgtagggtctaccttttcattcattctagacagtacttaccatgttgtgggcatgcactgaatactacacctattaatccacagattaaaagcaattccttcactgaggatcaagcttatgacaaacgtgaagttgttcttgaaccatccaaggaaaagtaaaggtctgaaataattttaatgcccaaagccactttatttccacaataaaatattataatatttattatactgccctaatattaccccaatccacttttaaatgaaaacattattatatattttctctcaaactagatttttgtcttccaaataccattaattagtgtgttttctcaactgccacaaatatcgacacaggcatttgatgtgctacaaaacagtaataccaaaatgctttatgaatttcacgctcaatgggggggatagggaatgttgccaatattttattttatttattttatttcattttttttttgagacggagtctcgctctgttgcccagactggagtgcagtggcgtgatctccgctcactgcaagctccgcctcctgggttcactacattctcctgcctcagcctccccagtagctgggactacaggcgcccgccaccacgcccggctaattttttgtatttttagtagagacggggtttcaccgtgttagccaggatggtcttggtctcctgacctggtgatccgcctgcctcggcctcccaaagtgctgggattacaggcgtgagccactgcgcccggccgccaatactttattaaacattataaagtcaaagaagtgggtagaagacacttggaaaaacctgaaaatatatatattacatgatttttttttttttttacaaataatcaactcgaatgagagactaaatatacaaactagtttaaatgtcttgtcaatggtacattcatgcctgtgcaaatactttatgtaattgacttcccacatgccttatttttgtcctgagttcttttatatttaatcacatttctctgattgtggtgattaattcttaacaaaacataactgaaaaggttcacagagtgtagccctgtgtgagtccaaaagggcaaaagcatcatggtctttggaacaatattcacattcctactaatcacagggagaaaaatgctcagattgaggacagtgatttctgattcaagtagttgtattcagcaatgtaaattaggccacagataaagcattctgtgtactttaagctcaaaaccatcagtgtcacagagcccagaggtaaacagatgcctgttcaatttcaccgaggcgatggccagatgttcctattcactctcctgttgtgtgccggacaaacacattgtatatactttcacactgacagcacacattacccctttttctaattgaaaagttgaagtgaaggacagtggtttctctgccagcattccttggacaacattttgattttggaaaaaacacacatttggggtttactttatcttcctaacattaagaaaggatggaccgccacatgccaggaactgaagaatcaacttccttcaaggaacttcctgtgaatatttttggtgtgatgaaataaatacatgttacctagacactgcttgattttccagtttactttacttttgattttccagactttagttttcaggctaccctccttgagaaagaaatgaaactacaaatggcctccacatttttgaggcacctgtccgatgaaaagctgtcagattggtaacctgagataggtcattagcttcataaaatgatgtcagacttgaggcagacataacagcatttgtaatgaagtcatttgtaatcccatcattttgacatctgcccaagtatcttttatttcaaagcccttgagatgaagacagcttcacctggcaaggggagggatggtcagtgaagctgttggagactgggcatggtggctcttgcctgtaatcccagcactttgggaggccaacacaggaggattgcttgagcccaggagttcaagaccagcctaagcaacatagggagatcctgtctctacattaaaaaacaaacaaaaaaaacaaattagccagcatggtgatgcgtgcctgcagtcccagcaatgttgtagggctggcttagagaccactaaaagcagcattacatgggcttaggaaaggaaaccaaggcaccatcagaatttctgcagggtggaatgttatatttccaataatgaaagtatgaactcaatcttcggaaaatgttggctccacaaaacaaatcccaaagattgctgagtggcttcactgtttcatcaaggtcaacttttattttaaacctgatgaaaatgtgttccaaagagcctatttaaattccaagctcctggctggccacagtggctcacgtctgtaatcccagcactttgggaggccaagaagggtggattgcttgaagtcaggagttcaagaccaacctggccaacatggcgaaaccccttctctactaaaaatacaaaaattagccaggcatggtggtgcatgcctgtaatcccagctactcaagaagctgaggcatgagaatcgcttgaaaccaggaattggaggttgcagtgagccaaggtcgtgtcactgcactccagcttgggtgacagagcaagactctgtctcaaaaattaataaattaattgattccaaggccctaaggctttaaatggattgtgtgaaaaatacacaaattttatgccatgtttatggaagctaacatatatatatatacacacacgtataatgtatatataatatgtatatgtacacctgcagcaatatttgtggagtaatttgtaatatggaaagacaactaattcttgataatccaataaagagttaccaattctccccttttacctctaaggaaaagaataaaaacagtaaatttctgttttattttactttaatactctcaatatttcagagttttacctgggaaagccattcttcatcttcctgtccactatggtcagaagctaaactgtcgtaagacccatgtcg

SEQ ID NO: 630 - DNA, 440 bp, Homo sapiens
ggtgtcaaactcctggcctcaagtgatcctctggctttggctctcagagtgctgggattacaggcatgaaccaccacgcctggcctaccattttaatactcagagaaatcaagcaatgaagtactgggaggaacagagaaaaagaggggaggtaagtagaaagaaaagtaagaaagtaagagatgatcattaaagaagtgtggaagaaatagaaaagaatgagaagctgaaaaccctcataatttctaccaccaaaagacatttatatatacacatcaacatacaaaaatttccttgagttagattcctacatatgaaatcagaggatgtaaatatataaatttcttaatatatgttcccagaaagagttatacacttacccaagcagtgaaagagaatgccaacctcactgagctcttgctagaacaaggtagtatttt

SEQ ID NO: 631 - DNA, 805 bp, Homo sapiens
tgtataagagagagaattagaataaatttaaatatccattaatagaagaatggctaaattatggaccaatcatactgtggaataccacacattccttaaaaaggttgaggcagtcatatgtactaacatgaaatgatttccaagattggagaatggagaaaagcaaggcaggataaacgcccacctgggagtgacacagagacagagaaacctcccccacccagggaagcagctctgcagagttggcaggatcaggggctagtctgaacccctagcacagaacactcacctcacggaagagtggccagaatgttttccacataggtcctggtcctcacttctcctcactgagcagggctgcccaacgtgggacttctgcacaaccatcctgcccctgcctgaccacttcaatcagaggcagcctggcagttaaaggaacacccacacacagaggtgaaaaagaaccaattcaagaactccagcaacacaaatgaccagaatgtcttatgtccttcaaatgattacactacttctccaacaaggttcttaatcaagttgagttggctaaaatgacagaaatagaattcagaatatggataggaacacagatgaccaagattcaggagaatggcaaaacccaatccaaggaaactaagaataataataaaatgatacagaagcagaaagacaaaatagcctatataaaaaataatataactgatctgatagagatgaaaaaccaagctgaggaaagaatcttggaactggaagactggctctgtgaaataagacaggaaaaaaataa

SEQ ID NO: 632 - DNA, 371 bp, Homo sapiens
taataatagctacctcatgcacttgtgatgattaaataagttaatccatggaaagtgcttagcatactacctgtcatatggtgaatatttaataaatgtgacttgcagttattctgatttagtgtacctctcaggaacttcttgatcttttagatatatactcactttagatgtatgatatgtctgctcccaatacttgtaccagcagcttctggactcctactttctcaggaaacctttttctcaatctcaactgtctgatacttgcccaaaataacctagccccaatcttactgaatttgctgcttattgtctaggggcccttgcagcttcaaagctgtcaggttcctaaatagcagttttgcattttt

SEQ ID NO: 633 - DNA, 366 bp, Homo sapiens
gaggcctatattcaacattcttaaagaaaaaaacttcaaccaagaatttcatatccagccaaaccaagcttccttagtaaaggagaaataagattcttttcagataagcaaatgctgagggggtctggtatcaccagacccactttataagagatcttgaaagaagcactaaatatggaaaggaaagactgttaccaaccaatacaaaaacagacttaagtacacagactaatgacactataaagcaatcacacaaataagctggcataacaaccggctaacaacacaatgacaagatcaaatccacacatataaaaaatgtaaatgggctaaatgccccattttaaaggcacggagtggcaagct

SEQ ID NO: 634 - DNA, 365 bp, Homo sapiens
gcagagtactcactgcaggttgttcgtgggggccggtgcatggcatagggaaaggaagacaaaacaggagaagttagcagaggtagggaatggggtagagactggatcatagaaggagttgtttgccatgcttacccttaaaggctttctgagcagtcatcctgggatggacagggcagggagtggagagaccagcgagcaggtttttgttacggttcgagtgagggttgaacacaggcagtggtggtggagacgggttgcagggataatcttgagagagatttaggagacaagattcacaggttggaatggatgtgggagaaaggaggagcttaacgccttggcttagtagccccatctgagaa

SEQ ID NO: 635 - DNA, 365 bp, Homo sapiens
gcagagtactcactgcaggttgttcgtgggggccggtgcatggcatagggaaaggaagacaaaacaggagaagttagcagaggtagggaatggggtagagactggatcatagaaggagttgtttgccatgcttacccttaaaggctttctgagcagtcatcctgggatggacagggcagggagtggagagaccagcgagcaggtttttgttacggttcgagtgagggttgaacacaggcagtggtggtggagatgggttgcagggataatcttgagagagatttaggagacaagattcacaggttggaatggatgtgggagaaaggaggagcttaacgccttggcttagtagccccatctgagaa

SEQ ID NO: 636 - DNA, 287 bp, Homo sapiens
gagaaaactgtcccagctccaggagagagagagcaaattcacttttttgttctgcctttttgttcagcctggacccttagcggattagatggtggctgcccacattgggtgaagacagatcttccttactcagtccactgactcaaatgccaatctcttctggaaacaccatcacagacatacccagaaataatgtttactagctacctgggtatccgttaatccaatcaagctgacagctaaaattaacaatcacagtactccagcttccagaatttttctcgaac

SEQ ID NO: 637 - DNA, 214 bp, Homo sapiens
aacaccatcctggctaacacggtgaaaccccgtctctactaaaaatacaaaaaattagctggggatggtggcgggcgcctgtagtcccagctactcgagaggctgaggcaggagaatggcgtgaacctgggaggcagagcttgcagtgagctgagatcgcgccactgcactccagactgggtgacagagtgagactccgtctcaaacaaacaaa

SEQ ID NO: 638 - DNA, 287 bp, Homo sapiens
gagaaaactgtcccagctccaggagagagagagcaaattcacttttttgttctgcctttttgttcagcctggacccttagcagattagatggtggctgcccacattgggtgaagacagatcttccttactcagtccactgactcaaatgccaatctcttctggaaacaccatcacagacatacccagaaataatgtttactagctacctgggtatccgttaatccaatcaagctgacagctaaaattaacaatcacagtactccagcttccagaatttttcttgaac

SEQ ID NO: 639 - DNA, 204 bp, Homo sapiens
aacaccatcctggctaacacggtgaaaccccgtctctactaaaaatacaaaaaattagctggggatggtggcgggcgcctgtagtcccagctactcgagaggctgaggcaggagaatggcgtgaacctgggaggcggagcttgcagtgagctgagatcgcgccactgcactccagactgggtgacagagtgagactgcgtctca

SEQ ID NO: 640 - DNA, 655 bp, Homo sapiens
cgttatccccacttcacagatgaggaaataggttccgaaaagaaacttactgaaggacacacagagggtcgagtcagagatccgctccaagccctatcttactctagtggccaccttctttttacttcacatcccatcataaaatataaaactaaacgaagtgttgatggttgtttaatgcgagcaatgcaggctgccaagtagaacaattaagactctgaaatagctattttgctttgactacttggcttatttaacaatctacagttactagctagatggataattgtacagcctctcaattactttaggttatgtggacataagcctggcgccgtttgattctgactctaatgatatttaatttcatattcctaatagctccttgtctagtgagtatcctagaggatagagaaaggtacactttgaggataacctcagttgcatgtactcaagcggtcttcaggtagcatgcatgccctccctttaaagaaacttagttcaggaaagttaggctgacaaataaatatactaggacatcatggtttcattacagaatgactctctcttttaaggggattcaccaccatttttgtctccttagcaagacccactagcatatttaaaatattattttaatatatgaatataaatt

SEQ ID NO: 641 - DNA, 655 bp, Homo sapiens; identical to SEQ ID NO: 640

SEQ ID NO: 642 - DNA, 86 bp, Homo sapiens
ggctggagtgcagtggcacaatcttggctcactgcaacctccacctcccaggttcaagcgattctcctgcctcagcctcccaagta

SEQ ID NO: 643 - DNA, 86 bp, Homo sapiens; identical to SEQ ID NO: 642

SEQ ID NO: 644 - DNA, 407 bp, Homo sapiens
tgcaatgaaaaagtggagaccacatcaaaataacctatgccactggattcacaatgtttgagaaatatctttgcccagagtaagcactgtcaaagatagaattctgtgccctcctccttccctccacaagatttgaaagagacaaggctcacatcttggagaatttctggctccttttgacctggcagtcttgagagatgcagctcggtcagaagattgcaaggatttcctgctttcagcctgtctagaaatactacaagatgaacatcccccatatctcattatttacttcttcctaagtcaggaaacttggagacatgtgaaaattcatcgcatgagtcgcagtaaatattttattgggagaggctgggtggtggtttgggtttcttttgtttatttcctttttt

SEQ ID NO: 645 - DNA, 218 bp, Homo sapiens
aaaaactgttcatctgtgaacttttccagatgtgcaattttaaagctaatgtcacttgttttccaaattagaagctgttagcaaaatatgtcactatatcattctgctgcctagtttatgaattggaagacactgaaaagatactataaggttaccatgtccggtaaaaaattcagacgacattgaaagagagaagattccacttgacagaaaaagtg

SEQ ID NO: 646 - DNA, 218 bp, Homo sapiens; identical to SEQ ID NO: 645

SEQ ID NO: 647 - DNA, 710 bp, Homo sapiens
aattgttcacagcaattttctttttctttttcttttccttttttttttggagatggagtctcgctctgtcatccaggctggagtgcaggagtgctatcttggctcgctgcaacctctgcctcctgggttcaagtgattctcttgcctcagcctcccaagtagctgggattataggcacatgccaccacgttcggctaatttttgtacttttagtagagatggagtttcaccatgttggccaggctggtattgaactcctgacctcaggtaatccacccaccttggcctcccaaagtgctgggattataggcgtgagtcaccgtgcctggccagccaatgttttaaatatcgctttccaaacattgttctgtattatttcgcattatgaaatgagttagagtatcaccagtaaaacaaggaagaagctgttactggaagaaactgaatccctaatggccatgattcggcttttcgtgtgtatgtgtgcatgtaaagtctattacttataatagaaaccaatataaacaagtataatactatgactgcttttgtcatctgatttgaaaacagtttaatatcaggcaacaacccaagtacagggaaggtatgtgatgtaaaacattcttctgtctttttaaatataattgatttaatcaaattttatctttttattttaatttgatatgtggagagacagcaaaattatgcct

SEQ ID NO: 648 - DNA, 710 bp, Homo sapiens; identical to SEQ ID NO: 647

SEQ ID NO: 649 - DNA, 1285 bp, Homo sapiens
  SITE (306): n equals a,t,g, or c
gtgatgactagagtagaataattttagaaaaattaatttatgatagagctggctttgggaaaaaatcatattcactcaaatatgacttttaattaattcatcttaatagtctgacatttgaaatgcatgggacaagatgaagtggctgaaaggatgctgcaaataagccaggaaaaccgcaaaatgatgtttgagagttcctgtttcctacctctgaccgattataatacttttctcttatcagtggaatgctatctccattgtgggttattttgtatggccctgaacgtatactttttctattgngtttttttgatgccatgacaacagataatgtacttaatgtggaaacttaagaaaaataattttccaaggggcttttcaacctggttcttctgatttcttcaagtaatggtgaaggaccattttctcggttgcccatgcttgtggaatgagcacatgaatcagacagaccaagatctgtcagttctgaaaagaccacatgcatttcctaaaaatgatcacagtgactttgtgcaaaggatatgatcattgtccagcgtcattaaaggatgctgcataaaggaacattttaatgtcttaatttgtgatcattttctctgggaatgcattttgtcacacaagtgttgtgtactgcatggaaaaagaagcatagtagagcaacaaatgaatattgcttcttaaaaatagaattttagaggaaacggttcttaatttgagtgctgttattatatggcaatggtaatttaggcactgagataaaaggtgtcccacagtgcacctagtttaaaaaggagtaagtcatcaagcatttcatcatgtgtgactcatatatggacatggaaaaatgtaagccatttatatataaacacgatgcttattaaaggaaaggaagaaaagaatataatggaaaacctagaagaatacttgcttttctttttctaggtgcacattaattagaacaagattaaagggcatgggtcaggtgaggtggctcatacctgtaatcccagcactttgggaggctgaggcaggaggattgtttgaggccaggagttcaagtccatcttgggcaacataatgacaccccccaaattaaaaaaaaaaatagccgggcatggtggcatgcactgagtccaagctacatgggggactgaggtaggagggttgcttgggcttaggaggtagaggctgcagtgagctatgattgtcccgctgcactcaagcctgcatgacagagcaagaatttgtctcaaaaaaaaaa

SEQ ID NO: 650 - DNA, 1285 bp, Homo sapiens
gtgatgactagagtagaataattttagaaaaattaatttatgatagagctggctttgggaaaaaatcatattcactcaaatatgacttttaattaattcatcttaatagtctgacatttgaaatgcatgggacaagatgaagtggctgaaaggatgctgcaaataagccaggaaaaccgcaaaatgatgtttgagagttcctgtttcctacctctgaccgattataatacttttctcttatcagtggaatgctatctccattgtgggttattttgtatggccctgaacctatactttttctattgtgtttttttgatgccatgacaacagataatgtacttaatgtggaaacttaagaaaaataattttccaaggggcttttcaacctggttcttctgatttcttcaagtaatggtgaaggaccattttctcggttgcccatgcttgtggaatgagcacatgaatcagacagaccaagatctgtcagttctgaaaagaccacatgcatttcctcgaaatgatcacagtgactttgtgcaaaggatatgatcattgtccagcgtcattaaaggatgctgcataaagaaacattttaatgtcttaatttgtgatcattttctctgggaatgcattttgtcacacaagtgttgtgtactgcatggaaaaagaagcatagtagagcaacaaatgaatattgcttcttaaaaatagaattttagtggaaacggttcttaatttgagtgctgttattatatggcaatggtaatttaggcactgagataaaaggtgtcccacagtgcacctagtttaaaaaggagtaagtcatcaagcatttcatcatgtgtgactcatatatggacatggaaaaatgtaagccatttatatataaacacgatgcttattaaaggaaaggaagaaaagaatataatggaaaacctagaagaatacttgcttttctttttctaggtgcacattaattagaacaagattaaagggcatgggtcaggtgaggtggctcatacctgtaatcccagcactttgggaggctgaggcaggaggattgtttgaggccaggagttcaagtccatcttgggcaacataatgacaccccccaaattaaaaaaaaaaatagccgggcatggtggcatgcactgagtccaagctacatgggggactgaggtaggagggttgcttgggcttaggaggtagaggctgcagtgagctatgattgtcccgctgcactcaagcctgcatgacagagcaagaatttgtctcaaaaaaaaaa

SEQ ID NO: 651 - DNA, 579 bp, Homo sapiens
tttggtttgaaaagaaagtccagggttttggtttgaaaagaaagtccaggaaacaggagaaatagctttaacgtacattatgtttttttgctttgtttttgagacaggatctcactctttctctaaggccaccatggttccctgcggcctctacctcctgggtgcaagcgatgttcctgcctcagtctcctgagtagttgggacaacaggcacacgtccccacacttggctaatcttttttaaaaaaattcatagagacaaggtcttgctgtattgcccaggctggtctcaaactcctggactcaaaccatcctcccaccttaacccgcctaaattgctgggattacaggtgtgagctattgcgcccagcctgttttcttcatggttaccctaaggaacatatattttggattattttttaattcttttgaaccaaaatatatttattgttcattcaagttttaaaaaaaatttcctatcttatttccacagtcggttaaacttttagctaacttgcctattgtctctgctgagttaaagttgccaacttttgttttaaatatttttaccaaaaaaaaa

SEQ ID NO: 652 - DNA, 251 bp, Homo sapiens
ggagatctagaccatcctggctaacacggtgaatccccatctctactaaaaatagaaaaaaaattagccgggcgtggtggcgggcgcctgtagtcccagcgactcgggaggctgaggcaggagaatggcgtgaacccgggaggtggaggttgcagtgagccgagattgcgccactgcactccagcctgggcgacagagctagactccgtctccaaaaaaaaaaacaaaaaaaactccggtgagggttaaga

SEQ ID NO: 653 - DNA, 405 bp, Homo sapiens
tttcaattatctagctaatggtcagtcttgtttcatctctacttgcttatttttaaacaaatgcttctatcagttcaatatatagttcagaattttctctagagtgtttagaagaaaacatgcatattacacgtaaaacaacagtaactatgagtaattaattttaatgtcagatattcagacagatatcaaatttccccagttgtaactcactacctcccacccccatgcatatgtggtaaaggttgttggagtcaggatccaactaatgttcataattcatttataattggttacgattgataactctcaagtctataaactccccacctaccttttcttagagtttacttgaagaaaaactttgctttttatacattatttagataatcttttgcttcatca

SEQ ID NO: 654 - DNA, 320 bp, Homo sapiens
tgtacatcctaattaccgtggggtgttaaatatgcagatgctgattcagtaggtctgggataggggcctgggattcagcatttctaacaaactcccaaatgctgaagcaggtggtctttgaaccacattttaagtggcaagatttaagaagccctttaaaataccaattcctaaacactacctagagatttttatttaattagtctgtggtaggtcccaggtatcaatagtttcagagattttctaggtgattctaatgtaaagatcaagaaccactgggttaggagatctggatttcaataattattattttggcagct

SEQ ID NO: 655 - DNA, 224 bp, Homo sapiens
ataagtgggagctaaacaatgggtatgtacagccacacagagtggaataataaacacgggagacgtccaaagctgggagggtgagacgggagtgagggatgtaatactatgtattgggtacaatgtgcactattcaggtgatggatgcactgaaagcccagacttcaccattgtgcaatatatccatgtaacacaagtgtatttgtacccctaaatctacaaaa

SEQ ID NO: 656 - DNA, 224 bp, Homo sapiens; identical to SEQ ID NO: 655

SEQ ID NO: 657 - DNA, 224 bp, Homo sapiens; identical to SEQ ID NO: 655

SEQ ID NO: 658 - DNA, 445 bp, Homo sapiens
cgcacccggcccattaagtggatttttaatctcacacgagctcaaggcacagctgaagaccttttaaattctgtgaaagatagtggatattcatagctagtttttaattccagacccttaatttctcttatctgtaagtcagccttgttgacttctgtctaacatttagcacctttacaaaattattcaagtcagtaaatatatatataaaaaacctatttggctttgtttcaagatttgctcatttaacctttaataatcctctttaaaatgggaatgatgatgtaacagaaatccctgtaacttacaaagtactatatgtagacgagggggaggaattcaacaacaatgcctgtcataaatcaggcagtgcattgggatactttttgtgggttttaattaaccaggtagttcacatcattcagcactcaaatgtcataaatca

SEQ ID NO: 659 - DNA, 120 bp, Homo sapiens
aggctggagtgcagtggtgcaatctcggctcactgcaacctctgcctcctgggttcaagcgattctcctgcctcagcctccctggtagctgggattacaggcgcccaccaccacacccag

SEQ ID NO: 660 - DNA, 171 bp, Homo sapiens
taaaatacaaaactagccgggcatggtggcacatgcctgtaatcccagctcctcaggaggctgaggcaggagaatcgcttgaacccgggaggcggaggttgcagtgagccgagatcgcgccattgcactccagcctgggcaacaagagtgaaactccatctcaaaaataaa

SEQ ID NO: 661 - DNA, 24132 bp, Homo sapiens
ttgcatatttcttttttttattatactttaagttttagggtacatgtgcacaacgtgcaggttagttacatatatgtacatgtgccatgttggtgtgctgcacccattaactcgtcatttaacattaggtatatcttctaatgctatccctcccacctccccccaccccacaacaggccctggtgtgtgatgttccccttcctgtgtccatgtgttttcattgttcaattcccaactatgagtgaaaacatgtggtgtttagttttttgtccttgcaatagtttgctgagaatgatggtttccagcttcatccatgtccctacaaaggacatgaactcatccttttttatggctgcatagtattccgtggtgtatatgtgccacattttcttaatccagtctatcattgttggacatttggcttggttccaagtatttgctattgggaatagtgctgcaataaacatacgtgtgcatgtgtctttattgcagcatgatttataatcctttgggtatgtacccagtaatgggatggctgggtcaaatggtatttctagttctagatgcctgaggaatcgccacactgacttccacaatggttgaactagtttacagtcccaccaacagtgtaaaagtgttcctatttctccacatactctccagcacctgttatttcctgactttttaatgattgccattctaactggtgtgagatggtatctcattgtggttttgatttgcatttctctgatggccagtgatgatgagcactttttcatgtgtcttttggctgcataaatgtcttcttttgagaagtgtctgttcatgtcctttgccccctttttgatggggttgttttttttcttgtgaatttgttttgagttcattgtagattctggatattagccctttgtcagatgagtagattgcaaaaattttctcccattctttaggttgcctgttcactcctatggtagtttattttgctgtgcagaagctctttagtttaatgagatcccacttgtcaattttggcttttgttgccattgctgttggtgtgttagacatgaagtccttgcccatgcctatgtcctgaatggtgttgcctaggttttcttctagggtttttatggttttaggtctcacatttaagtctttaatccgtcttgaattaatttttgtataaggtgtaacgaagggatccagtttcagctttctacataatggctagccagttttcccagcaccatttattaaatagggaatcctttccccatttcttgtttttgtcaggtttgtcaaagatcagatggttgtagatgtgcggcattatttctgagggctctgttctgttccattggtctatatctctgttttggtaccagtaccatgctgttttggttactgtagccttgtagtatagtttgaagtcaggtagcatgatgcctccagctttgttcttttggcttaggattgacttggcattgggggctgttttttggttccatatgaactttaaagtagttttttccaattctgtgaagaaagtcattggtagcttgatggggatggcattgaatctataaattaccttgggcagtatggccattttcacgatattgattcttcctacccataagaatggaatgttcttccatttgtttgtatcctattttatttcatcgagcagtggtttgtagttcttgaagaggtccttcatgtcccttgtaatttggattcctagatattttattctctttgaagcagttgtgagtgggagttcactcatgatttggctctctgtctgttattggtgtataagaatgcttgtgatttttgcacactgattttgtatcctgagactttgctgaatctatcagcttaaggagattttgggctgagacagtggggttttctagatatacaatcatgtcatctccaaacagggacaatttgacttcttcttttcctaattgaataccctttatttccttctcctgcttgattgccctgaccagaacttccaacactatgttgaataggagtggtgagagagggaatccctgtcttgtgccagttttcaaagggaatgcttccagtttttgcccattcagtatgatattgactgtgggtttgtcatagatagctcttattattttgagatatatcccatcaatacctagtttattgagagtttttagcatgaagtgttgttgagttttgtcaaaggccttttctgcatctattgagataatcatgtggtttttgtctttggttctgtttatatgctggattatgtttattgatttgcatatgttgtaccagccttgcatcccagggatgaagcccacttgatcatggtggataagctttttgatgtgctgctggattcggtttgccagtattttattgaggatttttgcatcaatgttcatcagggatattggtctaaaattctcttttttggttgtgtctctgccaggctttggtatcaggatgatgctggcctcataaaatgagttagggaggattctctatttttctattgattggaatagtttcagaaggaatggtaccagctcctccttgtacctctggtagaatttggctgtgaatccatctggtcctggactttttttggttggtaagctattaattattgcctcaatttcagagcctgttattggtatattcagaaattcaacttcttcctcgtttagtcttgggagggtgtatgtgtccaggaatttatccatttcttctagattttctagtttatttgcgtagaggtgtttatagtattctctgatggtagtttgtatttctgtggtattggtggtgatatcccctttattattttttattgcgtctatttgattcttctctcttttcttctttattagtcttgctagcagtctatcaattttgttgatcttttcaaaaaaccagctcctggattcattgattttttgaagggttttttatgtctctatttccttcagttctgctctgatcttagttatttcttgccttctgctagcttttgaatgtgtttgctcttgcttctctagttcttttcattgtgatgttagggtgtcaattttagatctttcctgctttctcttgtgggcatttagtgctataaatttccctctacacactgctttgaatgtgtcccagagattctggtatgttgtgtctttgttctcgttggtttcaaagaacatctttatctctaccttcatgtcgttatgtaccctgtagtcattcaggagcaggttgttcagtttccatgtagttgagtggttttgagtgaggttcttaatcctgagttctagtttgattgcactgtggtctgagagacagtttgttataatttctgttgttttacatttgctgaggagtgctttacttccatctatgtggtcaattttggaataggtgtggtgtggtgctgagaagaatgtatattctgttgatttggggtggagagttctgtagatgtctattaggtctgcttggtgcagagctgagttcaattcctggatatccttgttatctttctgtcttgttgatctaatgttgacagtggggtgttaaagtctcccattattattgtgtggtagtctaagtctctttgtaggtctctaaggacttgctttatgaatctgggtgctcctgtattgggtgcatatatattcaggatagttagctcttcttgttgaattgatccctttaccattatgtaatagccttctttgtgtcttttgatctttgtcggtttaaagtctgttttatcagagactaggattgcaacccctgcctttttttgttttccatttgcttggtagatcttcctccatccctttattttgagcctatgtgtgtctctgcatatgagatgggtttcctaaatacagcacactgatgggtcttgactctttatccagtttgccagtctgtgtcttttaattgaagcatttagcccatttacatttaaggttaatattgttatgtgtgaatttgatcctgtcattatgatggtagctggttattttgctcattagttgatgcagtttcttcctagcctcaatggtctttacaatttggcatgtttttgcagtggctggtaccagttgtttctttccatgtttagtgcttccttcaggagctcttttagggcaggcctggtggtgacaaaatctctcagcatttgtttttctgtattttatttctccttcacttatgaagcttagtttggctggatatgaaattctgggttgaaaattcttttctttaggaatgttgaatattggcccccactctcttctggcttgtagagtttctgccaggagatcagctgttagtctgatgggcttccctttgtgggtaacctgagctttctctctgtctgcccttaacattttttccatttcaactttggtgaatctgacaattatgtgtcttggagttgctcttctagaggagtatctttgtggcattctctgtatttcctaaatttgaatgttggcctgccttgctagattgaggaagttctcctggatattatcctgcagagtgttttccaacttggttccattctccccatcactttcaggtacaccaatcagatgtagatttggtcttttcacatagtcccatatttcttggagactttggtcatttctttttattcttttttctccaaacccctcttctcgcttgattttattcatttgatcttccatcactgataccctttcttccagttgatcaaatcggctactgaggcttgtgcattcatcatgtagttctcatgccatggttttcagctccatcacgtcctttaaggacttctctgcattggttattctagttagccatttgtctaattttttttcaaggtttttaacttctttgccatgggttcgaacttcctcctttagctcagagtagtttgatcgtctgaagcgttcttctctcaactcatcaaagtcattctctgtccagctttgttccattgctggtgaggagctgcgttcctttggaggaggagaggcactctgatttttacagtttccagtttttctgctctggtttttccccatctttgtggttttatctacctttggtctttgatgatggtgatgtacagatggggttttggtgtggatgtcctttctgtttgttagttttccttctaacagacaggaccctcagctgcaggtctgttggagtttgctggaggtccactccagaccttgtttaccttggtatcagcagcagaggctgcagaacagcggatattggtgaacagcaaatgttgttgcctgatcattcctctggaagttttgtctcagaggagtacccagctgtgtgatgtgtcaatgtgcccctactggggtgtgcctcccagtttggctactcgggggtcagggaccacatgaggaagcagtctgcccattctcagatctccagctgcgtgctgggagaaacactattctcttctaagctgtcagacagggacttttaagtctgcagaggattctgctgccttttgtttggctatgcctgcccccagaggtggactctatagaggcaggcaggcaggcaggcaggcaggcctccttgtgctgcggtgagctccacccagtttgagcttctcggctgctttgtttacctactcaagcctcagaaatggcgggtgcccctcccccagcctcactgccgccttgcagtttgatctcagactgctgtggtagcaatgagtgaagctccatgggcgtaggatcctctgaggcaggcgcgggatataatctgctggtgtgccatttgctaagaccgttggaaaagcacagtattagggtgggagtgacccaattttccaggtgccatctgtcacccctttctttgactaggaaagggaattccctgaccccttgtgcttcctgggtgaggcgatgcctcaccctgcctcggctaacgctgagtgcactgcacgcgctgtcttgcacccactttctgacactccccagtgaggtgaacccggtacctcagttggaaatgcagacatcacccgtcttctgcctcgcttacactgggagctgtagactggagctgttcctattcggccatcttggttccaccccctgaaaatcctgcatatttcatttaaatatatttcacctcacatttagcatgtccttttattttttggtgttaaaattgtcttagaaaataattgtgatggtgggtagtccttttttttttttgaacatattacttggcaaaaatttaaaactggcacccacatgtcagtgttccagcatctttctcccacaagctcttttgaggtaatttggggccaccacaggtgttgaggaggaggtgacgatagggacttgcttgctactccacagcctctaccccatatcttcagccagactagttctgctgcttttctgttttatatattacagtttaatttgtactttcatccagggtggagccttctccagcaccctctattttgccttctcaccatcccctcactggccctctacttctgcgttctgaattctcactgcatcctgggcccaagcacttgtagtgtgcaataattattcttcatggaaaacacaacattgttgtctaccatatggttttttgccaccttagcggttgcctttgttgggtttgatttaccccacgttaaatgggcaacagttatgcaccgtgggcgccatcaggtcatgatactaagatttaaattcaatagcactgatgaattcaaaccctacatttttgtgaagctggctttcggtacataaccttgagtgaacttagctctctgtctggcacctagtgggcatggatagagttttcagcaggaaagagactgaggtgatgagacattttcccttttcttctagaaacaaacacccaaagcgcctcttttgtatttgctttgaagagacggagaatatgattctgtaggctcacatactaggtgacattgcaggctgtctctaccgaaaagtacaagcatcgcctagggttctgtgacacacacagttccccacggtagagttctgatgctgtttttgcctcatttaaacggtgaggtgggtgacagtttaaacttatttactgtttcatatttttgttatggaaatcttaaaaaatatacaagtagagagtgtagtataacaatataatagtgtagctctctgttcttgttccatctcttccactccatttgttttaagctggagtcttttttccccccaagtacatctcaagccatttttaaaaggaacccagcatcaccttatttctgtccccccactgccctgcccatgaactgcccctctctccccaaaaaggtgctcaaaagtgtcagagcaccttgcttctgacagcctcaaagtattcagccttaccaccaagacaagcacccacctgtttccttgctccctgagtgaaggacacatctgaatcctgtagatgagccagcactagtcttagcaaaaccaaggtcgttgtggtcatgctgccatcacactgccaaaagatcagggcctccagagagctgggagcacctgaccctggcccagggagctggaaaaattgaccgtgggggttttgagtgcagaaggttcaagggtaaaagtttttctcccacaataaatgcacctccaggaaaacacagcccctggaggcctgaccactgccaagcctgtgagctctacctctccgggccctttctgctaccacttttatctcccaatttaaaagcaggactccttgtgaccctgcccagagaatggggtcagagttattggaggtttgctagcagatggaggtatcatgagctactaaggccagtggaacaagggcaggaggcgcagttagaagcttttgaagatgatcccagagggaacatgaaatgatgcagaggtgacttgtgccactggatgtcagattctacaggcagaggatgggacagtgacctccctcagtgataacccgtagcacgtgccattgatttcatacagttcggttttaaggaagggcaggttatctttttttttttttttttttgagacagagccttgctctgtcacccaggctggagtgcagtggcacaatctcggctcactgcaagctccgcctcctgggttcatgccattgtcctgcctcagcctcctgagtagctgggactacaggcgcctgccaccacgcctggctaatttatatttttagtagagacggggtttagtagtagccaggatggtctcactctcctgacctcatgatccgcctgcctcggcctcccaaagtgctgggattacaggcatgagccactgcgcccggccccattatctcttgatgaatatctcttatcctattttctgagtttcttaaagacaagaatattcttaactttcactgttagaactctatgtgttttgcctgctatgtaaactagggctcccttttatctctttttaggctgctgtctccaaagcctttccccactccctcaccatagtaggccaagactggcagataagtgtgctttctgcttctatccccttgaagtttcacagacttcatgaagtcttttggaatgacagtgcctatcctctcatcctattttcagtctgacagcccagaaatggagcatcattatagttatattggtgttgatgtcagtaggtcatcaggaagcttcaccatcctggcggcagcatgccaagagactgggttggccaggagatgtctcccatagggatatgggaagggctttgagaccatcttggcctcacatgggtgctaatgtagtcaccactctctctatactctctgctttccctccaggagggccgcaagaacgagatgctgctgtccaaggtgaaagcgaaggcctcctgaacatccccagccgtggctgtatgtcattgattttacttttaagcaccgtatatcacctacaagatcatgaaatggttctgaaagcgacagtagagagatgcagttgtgatgatttcaacaacctggatgttttctttctcctctttgcttccattcatctctgttggctgctgttgatggagtcagacagtaaacacgtggcttggataacacccatcatcctatgaagaatatagggagtacttgttctctgttgattcaacttttatgtctccagtaacattgcgcttatgaaggtacctgtatttgtatggactctgaataaagaagaattcatttgtttagcaagtattagttcagcaaccactgagaaataagcactgaggaagattcagagacgtgtaaaacacagttcctactgcacaagtacccagcaggtggcccagggaggcagatacagcacacttgaccgcagaactgggctatccaagatgtttttcagtaaacagaaggcatttagctgaaatgatcagcccatgtagtgttggtcacttgggcctttcacctgccatggtaccttttgttcccagctcctccaggtgccagccagcaggcttggtggtgacagcaactggaacgaaagttcagtgttgttttaatttttatacgttactcaagttgatttctcagaaaattgaaaacagaccttgtgctgaggacacgtcaataaaaattataccttcccctgccccaatgttcatgtgagtcacagcatgcagaggggctgtgcatccccctcattgaaggcacatttgatgaggctacgctgcagatgggtcatggtctgagccaggagagagatagacactgttccctgcactcaaggcaagtagggtgtcaggaggaagagcagtagggtttgcagagatccagggaaacttcctggaggaggcagcatttgagccctatctaaagggagaatcggatgttgataggaagactgttttaaatgaaaatacactatgattaaaaacccaagagagtgcagaggagtacaaggcatgcatgttgggaaaggagggaataagctagtctctgcaggaggcttcagagacccgtctgggaagtagggctgagactaggctttggagggccttgaagggcagctgagggttgattttaatccttggaaatgaccagtgcagatcaaacatggagctcctgctgccctggtcctcaggagtctggtaactcagtcatgttctgtaggtttgtgctccattttgcataaatcttgcaaacataccaggtggcaggtttgcacagtaacacaaaagcttaaacatgtcaagcaagtggggcattcagcagccacagaaatgtgttcatttttagtccctaatggatgtgattaagcagggctgatgtgtacagatttaaaaacacacacacgtgctggattaaaaacagccactggtttcagtgccagggccagcaaggcctacctgagccaggcggaagcagcagcttgcaaatagaaactgccacctgcgagcgcttcttgggtcatgtgcagctccacctcagctggtccctgagccgtggtcatgtgggggttttgaagggctaagttgaagcaagtaattgcaaaagaacaggtggcactctgagggcaggggaaggagacagaagtttgactgcgtttgaaattatttcagtcagggaaacatctgcgttgtcttgttaagcagcttgtaggcccacccctggctaactgaactttgtgagcagttggggcagttatttgaatatttgtccaaaggtggtagggaggcagatgacattctggggttactggagtccacctctgtgctgatggggaaagtatggcatgatgaatccaaagcaaccagtaattctttttgaaagtgcaggcatttattttgagctgtatttcataggagtttcatttggtttggttttggtatagagaggtgtccatagatctctattccctttttttttttatcgacaaggcctactacggataaatcagtttttgttgcctgaatacactttgaattagactacagaagccagtttgagctcaaatttcacacttgctgcagacaactctcagtgtggacagtgcctttctgagtaattaggatgttacatgactttttggtgaagccgtatagggtaaggagatgccccaaggcccctgatcatttcagaagccacctggagcaccagaaggggtcatcttcccagggctatggctctgtgtgcttagacagacatagtatggaattgtgctctaagcccacaggcttctccggagttaaaaggaagcaagaacatccttaagttactttttcaaaatatgcgcttcaggaggaaccaggtttccccaggagagagaggctccctgctcaatcagcacagggagttgctagcgggcaggctgcccagtgctgtggaatctccgccagcctctgggttgggggctccctcccacttcttgcttcttatggagtacatgggactgctctgctttaagccgcgatcagagctgttgtgagcaggacaagattgcgtgatcacgaggtgcgtggggagatgctaggacatttgttgatgtctttgacctgtgctccgtctctgttggatgactgggttagctaacaccactagagggaggtacagaatgttaaacagtcgtcagagtcacactgagggttgttttaacagagggcaaattcccagtttgtcaagcatatctctgttagagtccgaagttcatggttttaatggttctagctcgtagcccttaatattttcaggatagctgggtcctgccagtgtccgctgagtccatcagcacaaccagaaggtccagggtccaggcatgggaagcattctctgacaataccgagccctcgggacctcctgaaaccttgagcagaggctggagaagaccttcagacagtccttttactacctcacaaagtgccatgcccgggacctcagacctcagggttgtgacgttgttgatgttgtcaggccccagtacgtctctagtgaccgaagcagacctgcctgaaagggcactccggacagtgagccctggctctaacctgtgccctcatatttctgctgcctcatatggtcttgtttgcccactctgtaggtgactgatcaccctaaaagggaggtaggtatctagcagtagcacagttactttgagcctgaccacttgttctgaagtgcagatgttgaaacatgcattgaggaagaacactttaaggaagcactttatgatttactcatggctggtgttggcctcaaagtaaaagaacatcttaatgcagaacagtacaataaagagccccataggatggatgccatcatctgtccccatggttgggattgccaaggaaagtgccttgttctgtgcatcttcagaatcccccaggccctctcttgatccttttcatgaagtccagagcattccttctattacaggctgaagatgcattgtaaaaggtaatgctataatagtattccctcttctcaataaatgtgcaaaactggagaatctggtgctgatctgcagcatacttgacaacacagggaataccgtggatgttccacgccagccttacatccgtccccattgcctgcccatgtccagtggccctgcgcaacaaaagtaagggcttgtcttaccacactctccccagcatctagctcaaggtagatgactgactgggaaattccggttggataaaatggcttttccacattgcaactttgcatctctattaggaaaatttagattgaacctttcctctacttgatgcttagtttgagaacagttttcacaactttagagggtctctctcagagtatgttatactgtaaccttgaagtttgagatgaaacaaggtgtcagaggttttgaatctttcaaaggaattgccttttacagatttttttttttattccctaagaagggaaaaagagagggaagaactacactaatgttagagataaggtatgttttggctcaaaatgtgtcatgaacctaaaggtaacttgatgggcagaaatgtctcagccatgtgaaccaagaagtgggaccacagtgcaaggctgtgggtggcagcactagatacggtggtggcaggagtgtgacatgtaggcactccatgggggacagctggacggtgtctatcaaaagtgcaaatgcataagctctttgaactagcaatgctactcctaagaattgtacctgtgtacaaggtacttgtgtacaagagtttttgttgaaacattgtaatagcaaaaagttggagagtgccaccaatacaggggaatggttaaatacattatggccagcttaaacaatggaatagtttgtagaaatttaaaacaatggatcctgtgtgtgtgtactaccatagaatgggccccaagatgcatgattaagtgaggaaaaaagcccatggtatcctaatgtttggaatggagaaagtgtgtagatgtatgtgtgtgcatatgttttcacacagacgtatacacgtgtatatcatatgtccacctgcatatgcctaggatgtctctgggaggatatctagcagcccggcagcctgaattgcctctgggaagaggggtgggaatgacttttcaatgtacaccttttgtaccttttgaattttgtaccatgtacatgtattatctattaaaaaatagttcttaatttttaatttggtatacttttcttaatagaaccaaaatggaagaaaattctgattctctaaatctgctttcttaaagataaagcctttgattcaaaagtagtgagactctttcttgggtcttgaggcaatgggccatgcaaagggaggtgtccttttctggtggaatagaatgcggcagtgaagcagaggctggctcttctcacactctgggagcatgttgggctggcagagggagggatggggatggggaaatggatggtgatgtgactaatcactgggacagacgggctgctgcagggttccgtccatcttacaaaaatcacagtgcaaccctggtcctctgacttttggggtacaaaagataggcatacctctgagtcatgattcaaggggggctgttaacatcctccagaagccgtgcccatcttgtgtagaaacctgctgtgggtgagccttccccacccctgccttcttttaaaaaccaacacaactctgattttgtccagctccgaggtggccgtgtgtcagccccaagagaggaacatgacagcttttccagtcaggggaatctcactttttttggccaactgctggtttgcggatggatgtctaacccagttatgaccagttttggggagactgctgaacttctggcaaagactttcctgatgatcagtgagagatgcactaggagagcttcaccctttcttcctgtgataagttatggaggggggacagggtttgagcaacttcagccatcttgagaccatgaaaagagacatcacaacacactgaggttggcagagggaaaaggtggaaagagccttggctctctgaaggcatgatgagcctctcaaccacactgaggcccacctgcttccatattcttgttccatgagaaaaatgaacctctgttagcttgtgcattcaaccaacaaatacttgagtttcttctatgtgtcaggccctgagaatatagcagtaaaaaaagcagacaagagaacctgctttcctggagctactctccagtgggaaaaaacacacaaacaagagaaatacgtaaatattgtcatgtggtatttcaacatgctgattaaagcacggaaggtatcaggagtgtctggtttggtggcggttgcaattttatattgagaagtgaaggaaggcctcactcactgactagtgagggagtgagtatatagatacctgtgtaaagaacagtccaggcacaggggatagcaagtgtaaaggccctaaggtaggagcatacccagcaggtgagtttgaggaacatgaaggagacctgtgtggggagccactggagggtttttgagaaggaaagcaatgtgatctgggttcatttttgtttgtttgtttgtttgtttgttttgagatggtgtttcgctcttgttgcccaggctggagtgcagtggcacgatctcggctcactgcaacctccacctcccgggctcaagtgattctcctgcctcagcctcccgagtaactgggattacaggcatgtgccaccacacctggctaattttatatttttagtagagatggggtttctccacagtggtcaggctggtctcaaactcctgagctcagctgatccacccacctcagcctcccaaagtgctgggattataggcgtgagccaccatacccggccaatctggcttcattttaataggcatccctacactggtgcagtggctcatgcctgtcgtcccagcactttgggaggctgaggaggggagatcgcttgagcccaggagttcaagaccagcctgggcaatatggcgaaaccccgtctttactataaatacaaaaaattagccaggcatggtggagcacacctgtagtcccagctactcgggaggcagaggtgggaggatgggttgagcctgggaagtcgaggctgcagggagccatgttcacgccaccacactccagcctgggtgacagagtgagactgtctcaaaaaataaaaataaataaaaaataaggatccctctggagggctgtgttgactatagggagggcagaagcagggagcccagttaagagacccctgaaatagtccagatttaaatataactgaaaggaaagttttataagacaatacttagccttttaatactacactctgattttttttcctgttttgaaaatgctgagcattgaagtgctgctttccatcatcccatcatagcagatgccttttcatggcaggtggaatgtacttccccttgactctgggcttttgcttgtcctatgggttagctgacttgacacaagttttgaaagtatgcttgcatggttgggtttaccttcttgcccttctctcttgagaagaacgtaccctgttggcccaaggacaggatgaaggacaaacagagcaggcctagacgcaacctaaagcttgaagccaagcctagatgagccctgcctagatcagtgaaatcccagccaactcaggcatataagcaagaaataaagacttgctatatgtcacagagacttcgtagtaattgcacatgactattgagaatgtcgctgattgagtcaactaccaaattggtttcatgatagggtgtgacctggagttgaaaagatacctctcaacaccactcaggtgacaggccagaagagcagcctctggggatgggacctacatgtggaatagacactcacagagcacagccatcatgataagaatccacagtccctcagacaagaccaggcatggtagctcatgcctataattccagcagtttgggaagctaaagtgggaggattgcttgaggccaggggttcaagagaccagcctgggcaacacaggaagatcctgtctctatacaaaaaatattttaactttctacatatggctagccagttttcccagcaccatttattaaatagggaatcctttccccaatgcttgtttttctcaggtttgtcaaagatcagatggttgtagatatgcggtgttatttctgagggctctgttctattccattgatctatatctctgttttggtaccagtaccatgctgttttggttactgtagccttgtagtatagtttgaagtcaggtagtgtgatgcctccagctttgttcttttggattaggattgacttggcgatgtgggctcttttttggttccatatgaaatttaaagtagttttttccaattctgtgaagaaagtcattgctaccttgatggggatggcattgaatctataaattaccttgggcagtatggccattttcatgatactgattcttcctacccgtgagcatggaatgttcttccatttgtttgtatcctcttttatttcattgagcagtggtttgtagttctccttgtagaggtccttcatgtcccttgtaagtggattcctaggtattttattctctttgaagcaattgtgaatgggagttcactcatgatttggctctctgtctgttattctgtataagaatgcttgtgatttttgcacattgattttgtatcctgagactttgctgaagttgcttatcagcttaaggagattttgggctgagacaatggggttttctagatatacaatcatgtcgtctgcaaacggggacaatttgacttcctcttttcctaattgaataccctttatttccttctcctgactaattgccctggccagaacttccaacactatgttgaataggagtggtgagagagggcatccctgtcttgtgccagttttcaaagggaatgcttccagtttttgcccattcagtatgatattggctgtgggtttgtcatagatagctcttattattttgagatacgtcccatcaacacctaatttattgagagtttttagcatgaagggttgttgaattttgtcaaaggccttttctgcatctattgagataatcatgtggtttttgcctttggttctgtttatatgctggattacatttattgatttgcgtatattgaaccagccttgcatcccagggatgaagcccacttgatcatggtggataagctttttgatgtgctgctggattcgttttgccagtattttattgaggattttcacatcaatgttcatcaaggatattggtctaaaattctcttttttggttgtgtctctgccaggctttggtatcaggatgatgctggcctcataaaatgagttagggaggattccctctttttctattgattggaatagtttcagaaggaatggtagccatatgtagaaagctgaaactggatcccttccttacaccttatacaaaaatcaattcaagatggattaaagacttaaacgttagacctaaaaccataaaaaccctagaaaaaaacctaggcattaccattcaggacataggcatgggcaaggacttcatatctaaaacaccaaaagcaatggcaacaaaagacaaaattgacaaatgggatctcattaaactaaagagcttctgcacagcaaaagaaactaccatcagagtgaacaggcaacccacaaaatgggagaagattttcacaacctactcatctgacaaagggctaatatccagaatctacaatgaactcaaacaaatttacaagaaaaaaacaaacgaccccatcacaaagtgggtgaaggacatgaacagacacttctcaaaagaagacatttatgcagccaaaaaacacatgaaaaaatgctcaccatcactggccatcagagaaatgcaaatccaaaccacaacgagatatcatctcacaccagttaaaatggcaatcattaaaaagtcaggaaacaacaggtgctggagaggatgtggagaaataggaacacttttacacagttggtgggactgtaaactagttcaaccattgtggaagtcagtgtggcaattcctcagggatctagaactacaaataccatttgacccagccatcccattactaggtatatacccaaaggactataaatcatgctgctataaagacacatgcacacgtatgtttattgtggcattattcccaatagcaaagacttggaaccaacccgaatgtccaacaatgatagactggattaagaaaatgtggcacatatacaccatggaatactatgcagccataaaaaatgatgagttcatgtcctttgtagggacatggatgaaactggaaaccatcattctcagtaaactatcacaagaacaaaaaaccaaacactgcatattctcactcatatatgggaattgaacaatgagaacacatggacacaggaaggggaacatcacactctgggaactgttgtggggtggggggagcggggagggatagcactgggagatatacctaatgctagatgacaagttagtgggtgcagcgcaccagcatgtcacatgtatacatatgtaactaaactgcacattttgcacatgtaccctaaaacttaaaagtataaaaataaaaagaaaaattaaaaaaaatgtttaaaaattaaaaaataaattccctcagacatgcctaaagaaacatggagggcacctgttgtttcctgactttttaatgattgccattctaactggtgtgagatgatatacaccatggaatactatgcagccataaaaaatgatgagttcatatcctttgtagggacatggatgaaattggaaaccatcattctcagtaaactatcgcaagaacaaaaaaccaaacaccgcatattctcactcataggtgggaattgaacaatgagatcacatggacacaggaaggggaatatcacactctggggactgtggtggggtcgggggaggggggagggatagcattgggagatatacctaatgctagatgacacattagtgggtgcagcgcaccagcatggcacatgtatacatatgtaactaacctgcacaatgtgcacatgtaccctaaaacttagagtataataaaaaaaaaaaaaaaaaaaaagaaacatggagggcatattcaaagggagaaaagtagcatactttatacattatacatgaccaaattaataaaactcttccattagccacatccatcctacagacctggaactttgtgaaattaaattgtgataccttagaaaataaatccacacaggaaagagatgaattcctctaacagcctcccaactccatcttagtcatgttctataggcagaggagacagagataagacagagacattacacttaccaaggatgttcctagaatgttaactggaaatcagatgtgtttttgtcaatagaattccattctgaatactctgaattaaaaggaatcataagtgcatccttgcataaagtcaatcatcaactgatccgtttcaggaattcaacattttgtaattattgtgagcagttgaagaaggctttactaactgaagaaaagtttgaagcctaaaatgtccagcagaagttgccaccaacttagcaagcaaatagttttcttttaaggaaatctaaacatacatgtgattccgtctgcctgagatgcttccacaatgagagcacgttaagtcaaacccctgccaaataaacattaaaagcacactatccaatagcaagagtaaaccaaaaaattctataggtgcctacccaacgatacccagactctccttgaaaccttcttcctggaatccaactagaatcatgcaagaggattcactatatcaggtgtagtctgcaaaggttcatgcagatctcatgctgcaaaatgcaagccaaagttgaaacatggagtctagtcaggtttctattaggttcctttcatctttctcatgtttggaaacaggcagacttgagtccaaatacctgcctgctatgtactcactatgtgaccatgggcagcctactcaccctcttagaatatagttaagtgaggactatatttaccttacagagtgaatgcaggagtaagtgatcatttgtatataaaacccagtacaacagctgtgcatgatgggggctcaataaacactacttttaaaaatgtattcctgaatgtgcattttatgaagggagaggtggggagattattaataccccctattatctttcagtcaatgagggaaaatcctcagtagacccaagattgagctctgacccttaaaagacaacaatgatggatgactgaatatataatttgactcgtaactacataccttacctgttccacctcctacaggttgtcagtcacctgcttattactttcttccctgccttaattcacgagatttgaggtggcttgtaggaaacatgcagaataacagtaaactataaactgaacataaaacactaggatagggaaatctaaaattggaattatagactggctggaaacattatacacaaataagcaggctactgggttttatataaattccagagttaagccaacaatttggttctgtgcttcttcttcctcaaaatgaaaacataaacacagtcaattaataatcctcattatcatgaaaagaaaacatgtcttcacaaagaatgcaataggataattaactgcatccttatatgaaatgcactgatgagttttataagaactattccaattgatagaaaaaagagggaatcctccctaactcattttatgaggccagcatcatcctgataccaaagcctggcagagacacaacaaaaaaagagaattttagaccaatatccctgatgaacatcgatgcaaaaatcctcaataaaatgctggcaaaccaaatccagcagcacttcaataagcttatccaccatgatcaagtgggcttcatccctgggatgcaaggctggttcaacatatgcaaatcaatataatccagcatgtaaacagaaccaaagacaaaaaccacatgattatctcaatagatgcagaaaaggcctttgacaaaattcaacaacacttcatgctaaaaactctcagtaaattaggtattgatgggacgtatctcaaaataatgagagttatttatgacaaattcacagccaatatcatactaaatgggcaaaaactggaagcattccctttgaaaactggcacaagacaggggtgccctctctcaccactccaacatagtgttggaagttctggccagggcaatcaggcaggagaaagaaataaagggtattcaattaggaaaagaggaagtcaaattgtccctgtttgcagatgacatgattgtatatctagaaaaccccatcatctctgcccaaaatctccttaagctggtaagcgacttcagcaaagtctcaggatacaacatcaatgtgcaaaaatcacaaacattcttatacaccaataacagacaaacagagagccaaatcatgagtgaactcccattcacagttgcttcaaagagaataaaatgcctaggaatccaacttacaagggagatgaaggacctcttcaaggagaactacaaaccactgctcaatgaaataaaagaggatacaaacaaatggaacaacattccatgctcatgggtaggaagaatcagtatcgtgaaaatggccatactgcccaaggtagtttatagattcaatgccatccccatcaagctaccaatgactttctccacagaattgcataaagctactttaaagctcatatggaaccaaaaaagagcccacattgccaagacagtcctaagctaaaagaacaaagctggaggcatcatgctacctgacttcaaactatactacaaggctacagtatccaaaacagcatggtactggtaccaaaacagagatatagaccaatggaaccgaacagagccctcagaaataataccacacatctacaacaatctgatctttgacaaacctgacaaaaacaagaaatggggaaaggagtccctatttaataaatgatgctgggaaaaccggctagccatatgtagaaagctgaaactggatcccttccttataccttatacaaaaattaattcagggccaggctcagtggttcacgcctctaatcccagcactttgggaggctgaggcaagcggatcacaaggtcaggagattgagaccatcctggctaacacggtgaaacgctgcctctactaaaaatacaaaaaattagccagacgtggtggcgggcacctgtagtcccagctgcttgggaggctgaggcaggagaatggcttgaacccggaaggcgtagcttgcagtgagccaagatcgcaccattgcactccagcatgggcaacagagtgagactccatctcaaaaataaataaataaataaatatattaattcaagatggattaaagacttaaatgttagacctaaaaccataaaatcccttgaagaaaacctaggtaataccattcaggacacaggcatgggcaaggacttcatgtctcaaacaccaaaagcaatggcaacaaaagccaaaattgacaaatgggatctcattaaactaaagagcttctgcacagcaaaagaaactaccatcagagtgaacaggcaacctaaagaatgggagaaaatttttgcactctactcatctgacaaagggctaatatccagaatctacaatgaactcaaacaaatttacaagaaaaaagcaaccccatcaaaaagtgggcaaaggatatgaacagacacttctcaaaagaagacatttatgcagccaaaaaacacatgaaaaaatgctcaccatcactggccatcagagaaatgcaaatcaaaaccacaatgagataccatctcacaccagttagaatggcaatcattaaaaagtcaggaaacaacaggtgctggagaggatatggagaaataggaacacttttacactgttggtgggactgtaaactagttcaaccattgtggaagacagtgtggcgactcctcaaggatctagaactacaaataccatttgacccagccatcccattactgggtatatacccaaaggattataaatcatggctgctataaagacacatgcacacgtatgtttattgcggcactattcacaatagcaaagacttggaaccaagccaaatgtccaacaatgatagactggattaagaaaatgtggcacatatacaccatggaatactatgcagccataaaaagggatgagttcatttcctttgtagggacatggatgaaggtggaaaccatcattctcagcaaactattacaaggacaaaaaaccaaacaccgcatattctcattcataggtgggaattgaacaatgagaacacttggacacaagaaggggaacatcacacgccagggcctgttgtggggtggggggaggggggagggaaagcattaggagatacgcccaatgtaagtgacacttaatgggcgcagcacaccaacatggcacatgtatacatatgtaacaaacctgcatgttgtgcacatgtaccctagaacttaaagtatat

SEQ ID NO: 662 - DNA, 368 bp, Homo sapiens
ttcaagtcttgcatcaattttaaataatcaacagtagctgcctagggtgctgtcctggaaaggattctgagaccaagttcctgctcagtggggagccaagccatgaccaattggcaatgtctgccatgcacatgggaagaaggcatagttacaacatctgccagacctttgctgtctttcttgagaaccttggctctgctgcttctacagtccaggcccaatggtataactctcaatacagcattagcactcagctgtggagggaagaatctcagatcactgacgaaaaagtccaagttccttcctccttaaaatctacccatgtctctctaacccctgtgttcatctctgcttagtaaagaggctct

SEQ ID NO: 663 - DNA, 280 bp, Homo sapiens
aattcatgaattttagctaagttgctctagctaagttgatcttgcagtcttgagttcaaaggctggaaacctgagctcaatctgtgttgcagtgtagaggcagaattccctcctcttaaaaagacctcaggtcttcagctgattgcatgagacccacccacattatagagggtaatcagctttacttctaaagtctactgatttaaatgttaatcacatgtaaaaaatactttcacaaaaaataacaatgatccttttaaaaagtaactaggaataaaaa

SEQ ID NO: 664 - DNA, 280 bp, Homo sapiens
aattcatgaattttagctaagttactctagctaagttgatcttgcagtcttgagttcaaaggctggaaacctgagctcaatctgtgttgcagtgtagaggcagaattccctcctcttaaaaagacctcaggtcttcagctgattgcatgagacccacccacattatagagggtaatcagctttacttctaaagtctactgatttaaatgttaatcacatgtaaaaaatactttcacaaaaaataacaatgatccttttaaaaagtaactaggaataaaaa

SEQ ID NO: 665 - DNA, 8173 bp, Homo sapiens
ctctcccgcttctctcgctgtgaagatggcgctctccagggtgtgctgggctcggtcggctgtgtggggctcggcagtcacccctggacattttgtcacccggaggctgcaacttggtcgctctggcctggcttggggggcccctcggtgagggacctgtagcgagaaaagcatttttgacgtccaggctctttcagtgtctcaaccttgcttgcattctgtctcttaattctcagagttccacgccttggccctggaatttttattcttctgttcaggattcaaactccgatccccactagtgacccggcttcctgaccctctgtactctcagtgccccatattgtctggtttccccgcgtgtcctgagctcatctttcagcctcactttttcggctcaggttttaccgctgctatctcgattccacctctttctgacttagcctgcagttcaaattgtcccacaggcattgcgctctctccagaggcataccctgagttactttcctgcctggcctttgcctgatttgtgtttcacagtctgattgcctatctcttcttgaccccaagaccttccttggatttcagaagtgtcaagccttgggatacaatctccgagactcctgctttacattagggactcaaggcgtgagggagcttctaggactgattcccagatagtctctttgatcttccttgtaggtcttcaaagcttcacctttctccaaaggcagatgtgaagaacttgatgtcttatgtggtaaccaagacaaaagcgattaatgggaaataccatcgtttcttgggtcgtcatttcccccgcttctatgtcctgtacacaatcttcatgaaaggtaaaaacgaaactacaatagaaattccggaatcagctcttgggcagggtcaaagagttagcataaataagatcatttgcaggttctgctatggggatgtgagccgagatatcttatatttcataaatgcctgcgccttaaactaattcctataaattagcacttcttgagaatgtttctagaaagatgttatgagaaacaacttatgacagcaacatgagggagggagaatataggtatgttctcgtactttcttaaccacacacctggctatagtagaaattttttgccttgcacacggcagggatctgtggctgtatagacctgccctgtgatgtatcagttgacttacccataggaaaatgaggtctaacccttgttatgaatctatattaggtagtatgttgtagtggcaatagccctacataatacttggtttctaaatgttttgtttcaaatcagagatccttagttactaggagaagatatgtatcgtgtcaagtgtctactctggagccagattgcctgattcaaatcccagttcgtcactgtgcgattggactaattaattaacccctctttccttggttttcttatgtgtaaaatgggagtaatggaacctacctatttatcacatgattgtgaagactttaaaaattgatacatgtaaagtacctagaacaggtcctgatccctagtaagtgccaagtaaatgttaacttattttcatctaaatgttacctaacagtattataagttggtgcaaaagtaattgcggcttttggctttcagtggcaaaaaccacaattgcttttgcaccaaaatctataatatgctctatgcttttatcataacactataataaactacattgtcaaatctgaacattatcataattattactagcttcatggacttgaaaaattacttatccttaatttgtagagataaaattggctgctttttctgttttcatgtagataaataggatcaaatgagagaaagggatgaaagcatttgtgtttgtttttaaactttttattatgaattttttttttttttgagtctcaccgtgtcgcccaggctggagtgcaatggcatgatctcggttcactgcaacctctgcttcccggattcaagcaattctcctgccttagcctcccaagtagctgggaatacaggcgcctgccaccacaccaggctaatttttttatttttagtagaggtggggtttcaccatattggccaggctggtctctaactcctgacctcgtgatccgcctgcctcggcttcccaaagtgctgggattacaggcttgagccaccgcgcccggccaactattatggaaatttttaaacacacacagatgtagagagagtagtgtaacaaacttccatgtattaacctcacttcattatcataactcatggctgccaatcctatttatatacttgccttatgtattattttgaagacaatcgagacatcatataatgacatgtaaatcattgataaatatgaaagcattaaagaaatagatgcaagaagccgggcgcggtggctcatgcctgtaaccccagcactttgggaggccggggcgggcggatcatctgaggtcgggcgtttgagaccagcctgaccaacatagagaagcaccgtctctactaaaaatacaaaatcagccaggtatagtggcacatgcctgtaatcccagctactagggaggctgaggcaggagaatctcttgaacctgggagacggaggttgtggtgagccaagatcgcaccattgcactccagcctgggcaacaacagtgaaactcccatctcaaaaaaaaaaagaaaagaaaaaaattagatgcaagaattttcataaaatgaaaatttaaaatgtaatcataaaaatatattgaactaaactactttaaaaagtgttccaggctgggcacggtggctcacgcctgtaatcctagcactttgggaggccaaggcgggcggatcatgaggtcaggagtttgagaccagcctggccaacatggtgaaacccagtctctattaaaaatacaaaaattagccaggtgtggtgatgggcacctataatcccagctactcggaaggctgaggcaggagaattgcttgaactcaggaggtggacgttgcagtgagccgagattgcgccactgcactccagcctgggcgacagagcaaaactccatctcaaaaacaaaaataagtgttccaggccgggcgcagtgactcatgcctgtaatcccagcactttgggaggccgaggcaggtggattgcttgaggtcaggagttaaagacgagcctgtccacatggtgaaaccccatctctactaaaaatgcaaaaattagccaggcatggtggcacacgcctgtaatcctagctacttgggattctgaggtgggagaattatataaacctgggaggtggaggttgcagtcagccgaaatcgcaccactgcactccagcctgggcaacaaagtgagattccatctcaaaaaaaagaaaaaaaaagttccagaaaggagattaaattaatatctggctggggaatacatagggttaatttagcaagactttctgaagttagggagcttgatttttaaaaaggagtgaccagtgaaacagaagagggagaccattccatagcagattacagaagccaaatgtagctagaagagaggcgatgtgctaggggaaaaaatgttgagaaaagagattcgagttgacctcaggagtttcaagttacctagtttaaagctttgagtatcgttggggaggggtgagagtgtttgcatgtgattgaacatggagtaggaagctgtggttaagatttaaactgggataacatcacactctgtcctctactttaatgaggcaggattgcagatgttatgggctgatgccaaaaaggctagaagaataaagacaaatatgtggaagcacaatataaagtttcatcaacttccataccgggagatggagcatttgagacaggtatgggccaggggcagatatccagaagttcatggtgaggtaattacatttaatcaagatctcaaggttttttctttcatttgttgttcaccattgatcaagcttttgccctttgccgtgagaacaaaatattgaactgaatgaggcatcagattatttgtaagaattgggttcatccagagttgtagccctccatagcaagagctccatagaatttctggcacactttctgaatgaaagttgtaaatactaaaatctaattagtttctgaacataacaaaagtctgcaagggggctgggcgcggtggctcacgcctgtaatcccagcactttgggaagccgaggcaggcagatcacgaagtcaggaattcgagaccagcctggcccacaaggtcaaaccccatctctactgaaaatacaaaaattagctgagtgtggtggcgggcgcctgtaatcccagctactcgggaggctgaggcaggagaatcgtttgaacccgggaggcagaggttgcagtgagccaaaatcatgccattgcactccagcctgggtgacagggcaagactccatctcaaaaaaaaataataataaaatgaaaatagaagtctgcaagggcagccaggcacagtggctctcgcctataatctcagcattttgggagactgaggtgggcggatcacctgaggtcaggagcttgagaccagcctggccaacatggtgaaaccccatctctactaaaaattcaaaaattagctgggcatgatggcaggcgcctgtagtcctagtcccagctactcgggaggctgaggcaggagaattgcttgaacctgggaggcggaggttgcagtgagtgaagatcgcgccactgcactccagcctgggtgataagagcaaaactctgtctcaaaaaaaaaaaagtctgcaaggatccaaagggcagcatgaaagtagtatttggtggtgacttgatgggtcgttttgaagctgagagtaagaatctaggacccattccgcagatcaggaagagttcactgaaggatttggtataatgtcaggctctgtactagacattatttgggatacaaaagtaaataagtcagaggttttgtcctcaaggaactaaccatccagaagtaaatagaaataaacttggggaccacatgcagtgctcatgcctgtaatcctagcactttgggaagccaaggcgggcagatcactggaggtcaggagattgataccagcttgtccaacatggtgaaaccctgtctcgactaaaaatacaaaagttagcctagagtggcggcttatgccaataatcccagctactcgggtggctgaggcaggaggatcacttgaacccaggaggcagaggttgcagtgagctaggattgcaccactgcactccagcctaggtgacagagcaagactccatctcaaaaagaaaaagaaagaaatttggtcctttttctgggctgtaatagaagtttactgtacagtggggtggatggattgtctattgtattaacaacttatttgggttaaaactgcatctgtgtttatttctgcttagttccgccaagacgtcaccaagtgtcttttcctaggtattatttccattccaccttttgccaactacctggtcttcttgctaatgtgagtacagacttccatctccccaacatcttgaagatgtatcaatttttttaaattaagaattactttaaacagcactcatttcagaagataggcagaggttatcaaacttctgctccaatcttctcattattccaaggttcataaaaaccacttaggaagaccttggttactgtgacacatcacagctataagtgtaggtggcctagactctccctatctcttagctgccctgagtcatgtgaaataagatagtgaccttctccatcatccctagaggctctctccccgagagagagtacttttagactaatttctttaggaaaagtacatttcgtattctgataacatttttattacttcatatccaaaaatgacatttcttaactgtgatcttgcatgtcattcattatctattgctgtataacaaataacttcaaagcttaatagcataaaacaatcgtataaatcattttcatgattttgtagctcaagaattagggcagtgctcaggtgggcagttgatttctctcttccatatagggttgacagaggtcccttagtgatatttagctgctgaatggactagtctggaaagtccaatatcactcttatgtctggtgccctggcagggatggctacacggctagaactgtcaaccagagtgcccagatgtggcttcttcagtatggcagcctcaagatagtgggacttctaacttgggagctcagggctccaagagtgaggggttctagtaagaatctacatgactttataaccttgtcttgaaggtcacatagagtcactgctgctctgtcctattgattgaatcagtcacctagaatgaaaaaagggcaggatgtagacctcagctctccatgagacaagtgccagagaatttgaggtcatgttttaaaaccaccaaacacgtagataaataaattaaaaaacaaatcgtggccaggtgcagtggctcacgcctgtaatcccagcactttgggaggccgaggcgggcagatcacaaggtcaggagattgagaccatcctggctaacacagtgaaaccctgtctctactaaaaatacaaaatactagctaggcgtggtggcgggtgcctgtaatcccagctacttgggaggctgaggcagtagaatcgcatgaacccaggaggcagaggttgcagtgagccgagatcgcgccactgcagtccagcttgggtgacagagcgagactctgtctcaaaaaaaaaacaacaaatcagttgccttttacatactgggtccacataaggactgtgctatagttagattgtcaacatcacatatagtgtcctggtcaggctgcaactctctccaaagcatgctcttcacatgctttagttcaaaatgagtcattatatctgattgctgcgtggcaggctattctgctagtccttcctttcacatcccatttcagtaatggtgcttgaaattgtgcttcagtgtgtcttataaactttggtctgagagtcacttaagagaaagggctgactgtagtggctctcaccagtaatcccagcacttggggagactgaagcaggaagattgcttgagaccaggagtttgagaccaccctgggcaatatagcaagacccgtctctgcaaaaaaattaaaaacttagccaggcatagtggcctgtgcctgtagtcccagctactcagtaggctgtggtgggaggattgcttgagcctaggaggtcgaggctgcagtgagctgtgatcttgccactgtactccagcctgggtgagagaggggaccctgtctcttaaaaaaaaaaaaaaaaaaaaaaaaactgaaaaagaaaaagaacactgaggtagggaaatagtgtctccatctcttcttcctagtattcatgtctaccaaatgctttctttggcttcctctgaaagaagccagtttcagcaagtgagtttgtgattctttctcctttcaggtacctgtttcccaggcaactactgatcaggcatttctggaccccaaaacaacaaactgatttcttagatatctatcatgctttccggaagcagtcccacccagaaattattagttatttagaaaaggtcatccctctcatttctgatgcaggactccggtggcgtctgacagatctgtgcaccaaggtattcctgcagttaacccttcctacaaatgtggaatcttgttagattcagtgtgcactaaactaggtaagaggagtagtcaggactttcctaacatctacaaatctcttacctcttccaagatacagcgtggtacccacccagcaatacatgatatcttggctctgagagagtgtttctctaaccatcctctgggcatgaaccaactccaggctttgcacgtggtgagcactttgagggcttctcttttccatagcatcaccatgtttcaggtgtttgcttgagctcatactatttgcctttcccctcctatgtggttgtgttacagaaagccttgagccgggccatgcttctcacatcttacctgcctcctcccttgttgagacatcgtttgaagactcatacaactgtgattcaccaactggacaaggctttggcaaagctggggattggccagctgactgctcaggaagtaaaatcgg

SEQ ID NO: 666 - DNA, 274 bp, Homo sapiens
aaataaaattattttttatttttgtagagacagggtctcactatgttgcccaggctggtcttgaactcctgggctcaagtgatcctcccgccttggcctttcaaagtgttgggattacaggcatgagccactgcgcccagctcctcacctcatttctgtgtcttttttctcaagaaacttagctagggggaaggaattgcccacagaaattttggtttgtatttcttttcttctggcacttcagaaagcaaggatactgcagtttagacctact

SEQ ID NO: 667 - DNA, 321 bp, Homo sapiens
cttgagtgtcataccctagccacctgactgtcaggggagcagtatgtggcacttgaggccttgggctggccatgcaggcccaccacaggtggcaaggaatcatgaaccccagctgagtcccctgcaggccttgcctaaaggagaagccagtgaatcaatgtgttacttgaacaaatatagggtctagggctggccaaaagggacagtgaagttggcttctcaggccacagtaggccttcacggtactcagcaggagaccccagcaggcagcatcagggcaggggtgctgaccatccctgacccaagcacgaggatcagaat

SEQ ID NO: 668 - DNA, 321 bp, Homo sapiens; identical to SEQ ID NO: 667

SEQ ID NO: 669 - DNA, 321 bp, Homo sapiens
cttgagtgtcataccctagccacctgactgtcaggggagcagtatgtggcacttgaggccttgggctggccatgcaggcccaccacaggtggcaaggaatcatgaaccccagctgagtcccctgcaggccttgcctaaaggagaagccagtgaatcaatgtgttacttgaacaaatatagggtctagggctggccaaaagggacagtgaagttggcttctcaggccacagtaggccttcacggtactcagcaggagaccccagcaggcagcatcagggcaggggtgttgaccatccctgacccaagcacgaggatcagaat

SEQ ID NO: 670 - DNA, 250 bp, Homo sapiens
gggtacagtcccttcttgctggtatgttgggaagctctggtgcaaagggcagtgatggcccttcaatcccaggcccacaagcaccacagccaggagagtcaaggttggatatgaagagggacttcctgaaagcaggcacaggaagggatgggagctcagctcaccgggtgctagacaagggagtgtgtctctttccccatgagtgacagcagccacaaggggatgcccagcattgggggtggggtggggg

SEQ ID NO: 671 - DNA, 250 bp, Homo sapiens; identical to SEQ ID NO: 670

SEQ ID NO: 672 - DNA, 250 bp, Homo sapiens; identical to SEQ ID NO: 670

SEQ ID NO: 673 - DNA, 764 bp, Homo sapiens
ctcacccatatctaacagaaatccctccagcaacatccacagcacctgtaaagagccctaatgaccgtaagtggttaagagaaggggtttccttcctcaccggacctgcagcttctctttcccaccaagagacatcaggtatctgagtggctccaacaagaaggattctagaagtggcccagaaagcctctttgtttctgtgggactgcgactctcgtctacccagaggcactgaacattcagagacactggacatctacccagaaaacaccaggaaaggggatgctggccgcaacatgcagtcaagtatggtaagcccctgtgttctctcaggcaagagaattttgcttcttcacccagaggcaccaagcagctgggtggcattagcaagggagatctggtcataatgggtgtgtggtccaggaagcctctttatccttgtgggccagaggcttccctctcccaatcagaaacactgggcagccaggtagcaccaataaaggtgatcctgccacaacaagaaacccaaaatgggaagcctctttgtccttgcaggctggagatccccattccatacttagaccaggtggcctggcttggggaatttcttgccacccacataggcagtaccagtagagaccagcgggagccccagtgataccatataaaccaaacataccaagatagcactgcaaaggctattttccaaggaaattgtcattgaaactacagcccacaaaagtaggtcaggacctgcatgttaa

SEQ ID NO: 674 - DNA, 763 bp, Homo sapiens
ctcacccatatctaacagaaatccctccagcaacatccacagcacctgtaaagagccctaatgaccgtaagtggttaagagaaggggtttccttcctcaccggacctgcagcttctctttcccaccaagagacatcaggtatctgagtggctccaacaagaaggattctagaagtggcccagaaagcctctttgtttctgtgggactgcgactctcgtctacccagaggcactgaacattcagagacactggacatctacccagaaaacaccaggaaaggggatctggccacaacatgcagtcaagtatgggaagcccctgtgttctcacaggcaagagaattttgcttcttcacccagagacaccaagcagctgggtggcattagcaagggagatctggtcataatgggtgtgtggtccaggaagcctctttatccttgtgggccagagacttccctctcccactcagaaacactgggcagccaggtagcaccaataaaggtgatcctgccacaacaagaaacccaaaatgggaagcctctttgtccttgcaggctggagatccccattccatacttagaccaggtggcctggcttggggaatttcttgccacccacataggcagtaccagtagagaccagcgggagccccagtgataccatataaaccaaacataccaagatagcactgcaaaggctattttccaaggaaattgtcattgaaactacagcccacaaaagtaggtcaggacctgcatgttaa

SEQ ID NO: 675 - DNA, 358 bp, Homo sapiens
aaactttcttgaaaccttggagaaaatagaaaatctcagcaaagagttagaaattataaaaaggccgggcacagtggctcactcctgtaatcccagcactttgggaggccaaggtgggcagatcaccttgaggtcaggagttcaagaccagcctgaccaacatggcgaaaccctgtctctactaaaaaaatacaaaaattagctgggcgtggtggcacatacctgtaatcccagctactggggaggctgagacagggagaatctcttgaacccaggaggcggaggctgtagtgagctgaatcgtgccaccgtattctagcctgggtaacagagcaagactctgtctcaaaaaaaaaaa

SEQ ID NO: 676 - DNA, 215 bp, Homo sapiens
gataactgtaaaccctggaaaaaacaagaggcaaccaaaggagaattctgaaaggtgaaaagaggaaggcaaactagttatgtcagtactagagaaacaacataacagcagggacctcacaacccccaccaacaacagcaacaacagaaggtggcccaggcctagtgtttctgaatgccaacctagcaatagagggtggcccagctagactaatt

SEQ ID NO: 677 - DNA, 215 bp, Homo sapiens; identical to SEQ ID NO: 676

SEQ ID NO: 678 - DNA, 273 bp, Homo sapiens
ataaagtttgaattacatactatgtagcctttttatattggcttctttcacttagtaatatgcatgtaacttttctctgtgtctttttatggcttgatagctcattccttttttagcatcgaactatcctgcttttaaataaaaattatccggacactttgtttcccataacacagccacatgaggtcctatggctatatcatacttttctgatgattatcaggtgaaagggtgttgtaattaaagcattatacaacagaggggaaacaattt

SEQ ID NO: 679 - DNA, 273 bp, Homo sapiens; identical to SEQ ID NO: 678

SEQ ID NO: 680 - DNA, 712 bp, Homo sapiens
tggcttgtgcctgtaatcccagctactcaggaggctgtggcagaaggatattttgaggccagaagttcaagaccagcctgtacaacattgcaagacccaatctctaacaaaattttaaaacttgtccgggcatggtggtagctcaggagttcaaggctacagtgaactatgattgtgccactgcaccccagcttgggtgacagacagtgagaccctgtctctaagaaataaataaaaataaaaaataagaggagcttttggaattcagctattaggaagttactggtgcccatggagggaagtgttccaggcaagtggtggtgttaaaggtagagagaagagacattagctcagtgcttcccaaataggatagccaaggcgccaagctgcagactgatctcaggtgtggcccagtgcctccccctcagctggaaccccagaccagactcctgcagtttcaagcagcctcctccttctatcccggtgtaccttccatatctcagtaccaccacggggaacctcaaagactcgacaacccatttcaaaagcctggctatggaaagaagaggaaagggaggagccgcaagtttgggagaaagtgtatttgggatgctggagtgggagcctgtttgtaggagccatagggcaggcttgaagatgaatgggaaagaagatgagaggaagaggaggtgagactgagagcttcaaaagc

SEQ ID NO: 681 - DNA, 1187 bp, Homo sapiens
gcatatagaaaaccgtcccagattgtcttttctaatctatttttggaggaggtttttatatatcccatgttttatattatttctcccaaaccggattagatatagtgaacaataaaataaatgcagtttccaaaaccttggtgttcagaaatgaagggaaccatgaggggagtgaaggggacttgccctttgctctgtgctgtatgcactgcccagggaacagccccaggacacttctatagtttctttctgagactcacaaggtgttagcaatgctctgagctcactcaattgacagatacgtttaaggttctcaaataaatttcaaacttctaaatttttccttttcattgtgtgcataatgtacagattaggaaaatgatcttctaattgagaagtatacttcaaagtttggaaataaaatcataaaaatgttttcctaaacatagcctttttcaggagtttttgtggatatggtcaaaggcaatagctctaattatctggggtcctcaggacaggaaatgagctcacactcatgctctcaaactgtgtcacagcatttttggaaatattttcatttctattcaagaggaggaacaaggccccaagtgttcaccctaattgtagaaaataaacataaacatgaaattcacaaaagaacaactataaatggctgcaaatatgtgaaactatgtttaacttcccagggagtcaaaaaatactaattaatacaagaatcatctttggcccaccacattatgattttgtctgaataagcctcttcaatgctggcaaatatgaggtaaaatggctgctccggctgctctttttggctggtcttaaggggcgcaaatagctccaccccatttggaaagcacttggcaatggctgctaagactttagtgtttttcatagcttctaacctgctaagaagtagatacttgttcccattttgctgctgtgcaaacagacttgtagaggtcaagtatctcgtacaaggttacattgatggtgattgatggcgccaagatttgaacttggttgtgagtccaaagtctaggtctcccattctacccatgtgattttacacacatgcctgatataattagctcctcctcctctccagagaagggcagctgacctttgtttcccagttcagaaatcctggtgtgagttatcagctgggg

SEQ ID NO: 682 - DNA, 96 bp, Homo sapiens
cccagctacttgggaggctgaggcaggagaattgctttaacctgggaggcagaggttgcagtgagctgagatcgcaccattgcactccaacctggg

SEQ ID NO: 683 - DNA, 319 bp, Homo sapiens
ataaagtgagatccttagaactgtgcaagaatatgtgtcacccagctgttaactgtagtgacgcggcgtgaccacgcaggcctggagcgcgggccagccttcctgaggaggctccagtctgtactcacgtgagaccgttgaaaagaacgtggtgtttctgtgcccatcttcacactgtgtgtgtaatttgccaaccaaaaaaagaaacggaattaagacagatgttcggcatgaatagagcttatttttagaaggagaactgatgagcttggaaattttaactttttctaccaggataaaacaggagttctttctctct

SEQ ID NO: 684 - DNA, 106 bp, Homo sapiens
gatcacctgaggtcaggagttcgagaccagcctggccaacatggcgaagccccgtctctactaaaaatacaaaaattagccaggcatggtggcgcgtgcctgtaat

SEQ ID NO: 685 - DNA, 269 bp, Homo sapiens
gtccaccagagcttgctctaataagagtaagaccaacacggtcaaccccaagaaaccgaccccatagagaagaagtgcgctggcaggcacttggggcccactccctggtgctcctaaacagtgtgtccaaaccccggctgcccgcagcagatccaggtcatgtactccaggactgtagccacacctcactgcccactcctgcgttagcactctccagccttaccttgctcaaatagctcaccctccatgcaaaaataaaaacaaaagca

SEQ ID NO: 686 - DNA, 305 bp, Homo sapiens
aaaaatcgaatctgtttaaagaaattggaatctgtgaaaaacttataaggcaaaggccaggaatagaaagaaatccagggatataagccagcatttggggctgctttccctaattgcatgtcactatccaagaagagatggagagaggtttaaaaactgaggtgagcttgaaacaaatttacagagctagaacaataaaaattgaaattcagcatccatcacacttgtggataggtgtgttaggatcctcaaaatgccactgtacttttaaatgtataatatctagctcatatctagcacaaaaa

SEQ ID NO: 687 - DNA, 652 bp, Homo sapiens
ctttggctgacactacacattggaatgtagtgaccagtggtccagaagcacctggtgctcgcagcacagtggatttctaacctcatggagtgagagaacaatgtcagggcccaatacaaatccccagggttagagcatacagtccagaagtcaggagctgagcattggtcccctaatgtctttcagaaatgaagccagtcagctaaatctaccctatatgataatcaaaccctcaaggtcatcaaataggataaaagagaacaaaagcctcgaaaggtcagcagcctcaaagattgaaggtggataaacccacaaagatgagaaagaatcagtgcaagaatcctgacaactcaaaaagccacagtgccttttttcctctaatctaccccattgcctatacagaaagggttcagaactggactaagatggctacaaatgacagaaatagaaatcagaatatgcatgaaacgaagatcattgagctacaggagtatgttgaaacccatccaaggaagctaagaacgatgataaaacaatgcaggagctgcccagcaaaaatagccagtatagaaaaaaaccaactgacctgatagaactgaaaaagacactacaataattttataatgcaatcacaagtattaaaagcagaata

SEQ ID NO: 688 - DNA, 326 bp, Homo sapiens
ccagtttcctaattgtgaccaatgtagcaaaccatttctacaattagctaaatcagtaagattgactttttttccagaacttacactggaacatagagatcagctaattgatagtgatagcagaaaagaagttatgcagagatatatggtgctattagtgttattaataatacagataacactgtttgcctccaaaacgttttatttaatttctcttcttaatatcaagccaaccaaatataatagtactttctcttttttattttcctttggctcttacattttgacttgcttatgtattttaataaatacaactggaaccaaaa

SEQ ID NO: 689 - DNA, 433 bp, Homo sapiens
gtagaattggttgaagtcacagcacaatagaattaagtggggcttaatgatcctctaccaaccagaggcgggtaaagggtaaccctgagagagacaagaagatgaacccagaccagaaggtatcctgcagagggaggcaaggccagaaagtgtttttaatgtaggggaaagggagtgtttgagatttaagtgagtaatgagaaggggctgaatgtttaatttccctaattctattgttaatactttggaccatgttcttatgagtggatgagacagaataaaaaaggattgcataaacacataggtaaggaaaagaaattaaggacctttattatgttaaaaaaagtagataactcctgaaaaattaagagttgattgtagttcaaaatcaaataacatgcttagagtaatgtaaattaaccatgagctgcca

SEQ ID NO: 690 - DNA, 433 bp, Homo sapiens
gtagaattggttgaagtcacagcacaatagaattaagtggggcttaatgatcctctaccaaccagaggcgggtaaagggtaaccctgagagagacaagaagatgaaaccagaccagaaggtatcctgcagagggaggcaaggccagaaagtgtttttaatgtaggggaaagggagtgtttgagatttaagtgagtaatgagaaggggctgaatgtttaatttccctaattctattgttaatactttggaccatgttcttatgagtggatgagacagaataaaaaaggattgcataaacacataggtaaggaaaagaaattaaggacctttattatgttaaaaaaagtagataactcctgaaaaattaagagttgattgtagttcaaaatcaaataacatgcttagagtaatgtaaattaaccatgagctgcca

SEQ ID NO: 691 - DNA, 433 bp, Homo sapiens; identical to SEQ ID NO: 690

SEQ ID NO: 692 - DNA, 293 bp, Homo sapiens
gcgtggtggctcacgcctgtaatcccagcactttgggaggccacggcgggtggatcacgaggtcaggagattgagaccatcctggctaacacagtgaaaccccgtctctactaaaactacaaaaaattagccgggtgtggtggcgggcgcctgtggtcccagctactagggaggctgaggcaggagaatggcatgaacccaggaggcagagctcgcagtgagccaagatcgcgtcactgcactcctgcctgggagacagagcgagactccatctcaaaaaaaaaaaaaaaaaa

SEQ ID NO: 693 - DNA, 289 bp, Homo sapiens
ggtggctcacgcctgtaatcccagcactttgggaggccacggcgggtggatcacgaggtcaggagattgagaccatcctggctaacacagtgaaaccccgtctctactaaaactacaaaaaattagccgggtgtggtggcgggcgcctgtggtcccagctactagggaggctgaggcaggagaatggcatgaacccaggaggcagagctcgcagtgagccaagatcgcgtcactgcactcctgcctgggagacagagcgagactccatctcaaaaaaaaaaaaaaaaaa

SEQ ID NO: 694 - DNA, 4963 bp, Homo sapiens
gaagagtcagaattggcgctggagtcccagtttgagactgagcctgagccccaggagcagaaccttcagaataaggacaaaaagaaggtaagccaggagtggtctttctgctgtggtatttagtcaacttatgcaagctgaaggcctgttcatgaagactagagccgtgcaagatgcagggccaaggagcaatgacccttcctcccaatgaaggagatttaagaccgcatacatggcatcaatatatattatatactgccatatgtaggtatgttgcagtggctttccaacttctttgggccacatctttttttttaaaatgaaatcttacgcaaaatagataaacgcagaaccatcctagttgaagcacccatttggctctctcctgggtgccctagtgactcctgagacatttttgtacttcttggtcttcttaaaggccagcttgaaaaccagtgatgagcgggtgtgtgtttgtatgtgtaacattattatattgggtaagtaggggttactggaatgattgttgtgatctcaaccaaagtgggcatagagaaagctttttggaaaggatgagttttaggaagggccagcagtagccagaggagcaggaaggagagcattttgaggtggggaacgtgaaggctctgagaaggctgtgctagagtggtccatctccctatggggaagggaggcagagggagaagggatgccattggtggggcctccaagatcctggtttgaagtctgcctttctcttgtgtacttgcgtggctcactcagctgactgactcctagcttatcctgtgctttctggggctgtggtgtctaacctgctgccatgtccagggatggaaatgggaattcaggagacaaatccaaagatattactctgggactctcacatccttccaggtgtgacttacatgaccatttgcataccttgacatatctgtctggattcatgtacattttgaccaaaggttattgttcctttgttttaaatgagagggagggaggataatgcctctctgtttaaatataataataaatttaaaacctgtcacccaggatataacatagagcaaacacaagcccagaggttgacactgatcccagcagtacatgcagaccgcctttattcccattcccacccccaggttgtgacgtgcccgctgttttgtccgtctatctgttgtcagattgtggcccaggctcctatttccaagcctgagtcccttctcttgtcccggcaggtgaggcaggagggagaatacagtggggaggcagtgggcagaggtttaggttggatggccattatcttcttctctctcagactgctgagggttcaattccatcttcttttccaccttctccagaaatccaagcccatcttgtgtccagccctctcttccctggttatctacttgaagtctgtctcattccgcagcttcacacattcaaaggagcactaccacttctacgagatatcatctttctctgaaaccaaggccaagcgcctcatcaaggaggctggtcaggaccaaaatggagggatggggagggaagtgggatggataggttcaggcctgatggactggcaggtaagtcccaagaaaaaagacaaggtagctaaggagagatgaaggagttcagaaactccttagagcagacaagggcagaggagttatgaatagtggctcaagggtctaggggcaggaaagctggtctggatggacagagtagagaggcacagtgaaactttctggagccagcttcagatgctggagagaagggtgaagagtaggcatggtccttgggactagggaagtgggagattccaccccacttccatctccctctctatacccttttacaggcaatgagtttgtgcagcacaatacttggcagttaagccgtgtgtatcccagcggcctgaggacagactcttccaactactacaacccccaggaactctggaatgcaggctgccagatgggtgaggaggcagcagggactgggaagagggagtggaggagcagcaggtgggaaataagttctctagtgatggtagggttggggaatgctcaagaaaattgctaggctgagaaatgctatcagtggatattaccagcaggtaccgtgcacccagtacctatcttcttaactccctgaaagaggggctggaaggcctccatggtgaatcttgctcttcttttctcctggggccctcagtggccatgaatatgcagactgcagggcttgaaatggacatctgtgatgggcatttccgccagaatggcggctgtggctatgtgctgaagccagacttcctgcgtgatatccagagttctttccaccctgagaagcccatcagccctttcaaagcccagactctcttaaaccaggtcacgcccaagtgccctctcgggaagcaactgacctaactgtgctcgaagcgagcgccgagtgtcctaggcctgaccggaatgtagaggccggatagcctattaacagtgtctagttttagcttttggagccagctgcctagcttcaaaccacaacttcctaattgggtaatgttgggcaagttccttaacctctccatacctcagtctgctcacctgcaaaataggggtaacactaccacctgcctcacagggttataaggagtataacagttaatataaagttcttacaattcctggcacacaggaagtgctataaaagaggctggctgggagcgatagcttacacctgtaatcccagcgctttggaggccaaggcaggaggactgcttgagcccaggagtttgagaccagtctgaaactggtctcaacaaaaaatttaaaaattttgtagagactcccgtctctacaaaaaatttaaaaattagcctggcatggtggcacatgactatagatagtcctggctactcaggaggctaaggctggagggtcactttagcccaggagatggaggttgcagtgagctatgactgccccactgcattccagcttggtcaagagtatgatcgtgtctctttgaaaaaaaaaaagtggctgctgtcattagcatgcctactttcaaactgttgaatttctacctggatccatttaatttatttgtttattctgagacagagtcttgctctgctgcaggctggagtgcagtggcatgatcttggctcactgcaacctccgcctcctgggttcaagtgattctcccatctgagccttccgagtagctgggactacaggcgcccgccaccatgcctggctaatttttgtatttttagtagagatagggtttcaccatgttggccaggctggtctcctggtttcaagtgatctgcccacctcggcctcctgaagtgttgggattacaggtgttagcccccggggccggcctttgggtgcctttttaattgcagataggatactagaaggaaatatattacccatggaggatgttttaaaaacccaaaagcttcttctcccttggggttgggagtaggtcggggtgggctgggctgaccaggaacttgtgagattccagagccctgactacaggtgatcagcgttcagcaactccccaaagtggacaagaccaaagaggggtccattgtggatccactggtgaaagtgcagatctttggcgttcgtctagacacagcacggcaggagaccaactatgtggagaacaatggtgagaaactggcagtgctggggaggtgggggtaggagcatgattagttttccttctagtctgtcttccattaagtatagcatctgttattgcatgtccccacatgggaggcagtgtggaacagtacaaagaatcctggctcttcacttaaaagctccagtgacctgggcaaattacttgcttactctgagcctttttccttacctgtaaaatgctgattgccatctagattaaatgagaacacaagaaaagcaacccagtcaagaaaactgtcataatgtcttcttatttctttctgtccaccaactcaggttttaatccatactgggggcagacactatgtttccgggtgctggtgcctgaacttgccatgctgcgttttgtggtaatggattatgactggaaatcccgaaatgactttattggtcagtacaccctgccttggacctgcatgcaacaaggtgagccagcccctttggcccctggccaataccccagctctggctgccttcctaatgctgtcctcctgccccttccaggttaccgccacattcacctgctgtccaaagatggcatcagcctccgcccagcttccatctttgtgtatatctgcatccaggaaggcctggagggggatgagtcctgaggtgggcatttcacgggaagggttggtgtgctggctttagacggggagaaacatctggaaggatgctcgagagaacaaatggaggtggtgaaaatcaagctttggattgtgcattcctaggcacaaaattacctcattcttcctaacaagcaatctgggacctgattttccaccttttttctcttttcttcccttcctttgttttcataagcctttggtatctttcctgcccttttcctttgtgtactctatactggagttcccttcttcctcttgctgtaggctcaatcccataccgacatctacaactaatctttcccatcaactctgtgtgaaggcaggttgcaactagaaattcagaggggcttggaatagagaaacctaaagaagcatcatcccctccatccccaacttcctcaaagcccaaagccaagggaaggataaatcaaggctcaaggcttccccagcaaagattagggaaagagacttgaccccaggactgtactacgactcttaagagaacactgcacagcactcaaagtcccccactggactgcttcctccttagccccactggtataaatacatctctctccaatttggcttcaa

SEQ ID NO: 695 - DNA, 5216 bp, Homo sapiens
tagagaaagaggttcccaggagacctcttgcatgtgctacataggaaggacacagagtatggcttttaagaatcagggcaaaagcagacaaaaggttatgtggtcccagccttcctgaagagtctggctggaaccatcctggtttatgtctgttgtcccagcataattattaatagtaccctctttaagttttcccagtgtgtctcagtttagatgatcaattatatagtaaggcactacagaattatactgtgaagcagttatagaattctgaattggagattttcctctctagtcatctgcctttccatagtatccttgtgctttaacaccttagtgtagctgctgagccagtctgaggattgatgatgagctaaagttgcttctaggaggaggcttagtgggtagcaatcctccctctatagatacaggtagacaaaggagcttggaagtagggagcaggtcaagggtcaagatggctcaaggacagggagaaggcagacctaggcctgtttcagtatcaatactgagtgaagatggaagggacaaaagggaggcagaggtctgagaggggacagagttgatcaagatgacagcctggaaatgttaagacagggatttggatgaatctataatgtagtaaccactttctgtttaacatgctttatagagcattaggcacaacagcacatgcggttagatacaactgtttttagaagattctgaaagaaaataggaattgacacagtaagaaggaaagagaagatggagtgggtaaaatccagatcttatagccagggactttgatggagtgatggtgaagaaactgagaacttgcaggttaaaaacgcaatgtacagcaataagaaatcaacgttatagtccatgtccctcttttatatgggtgataatttcaaagtactatagccagagtcccaggaaggttctagtcacccttgtaccccaaaagccagtctttccttaggctctgagctcctcaggctagcgctggtcccagtctgcacatctcagaccataccctcttcctatacaggaggtggggcaggctttcagccctcaggtccagtgtggggagcggcaggagcaggagggctgggatcctccagctgcacatcatgcaggtgcactgtgggggtggtggggtctttgcccacaccctggtttgggtcggcttggtcagggtggtgcctgcgtacgtgcttgaccacctggaacttttgcttggccttgtagttgcagaggcggcaaaagaaggggtggcggtcggtgtgggtgagggcatgatggcgcaggccagcagcccagcggaaagcacggtggcacacattgcacacatagggtttggcctcactgtgcttgcgaaggtgggtgcgcagcaggaagcgcgtcttgaaggccttgccacactgctcacacatgaaagcccgtgcttctcgatgccgggtctcctggtgcacacgcagtgcatcagcccggttggtgcagtactcacactcgggacactggtatggcttcagtcctacaggacagggaacaaatcaccattgaaaggcggtggagcaaggtttactgggccatggagttactgcaatcagtggatataaagaatgcaagcagcaagttgactaatgaccatctctttggaatgctccagtcctccagtcctgtctgacatttcttttttcttttatttttctttgagacggagtttcgctcttgttgcccaggctggagtgcaatggtgcaatctcggctcactacaacctccgcctcccaggttcaagtgatcctcctgcctcagtttcccaagtagctggaataacaggcatgggccaccacacctggctaattttgtatttttagtgaagacagggtttcaccatgttggccaggctggtcttgaactctggacctccagtgatgtgccctccttggcctcccaaagtgctgggattacaggcatgagccaccgcgcctggccctgtctgacatttctgtgcctttccaacacagcgtccttgtacatcaacaagaactcaatgttgtagtcccagcaatcaatgttgtgggtgcccaatggatgctgatgattaacgggacctctaaccaactagctacctgacagtaatgaatactcaaatatggaagggtttccccatgggaaattataaccctcttttggtcacagagtactcatggaattcgacaattcatttaaacacaacggcttgttcaactcaaaaagtcaaagacccagcctgggcaacaaagtgagaccctgtctacaaaaaaattaggtgggcgtggtggcgtgcacttgtagacccagctaattgggaggctaaggcaagaagatgatgtgcacccaggagtttgagattgtagtgagctatgactgcaccactgcactccagcatgggcagcagagcaagaccctgtcactgaaaaaaaaaaaaaaaaaaagtaaaagaaatacttaggaggggccgagcatggtggctcatgcctgtaatcccagcactttgggaggccgaggcgggcggatcatgaggtcaggagattgagaccattctggctaacacggtgaaacccccatctctactaaaaatacaaaaacttagccgggcgtggtggcgggtgcctgtagtcccagctactcgggaggctaaggcaggagaatggtgtgaacccggaaggcagaggcagaacttgcagtgagcttagattgcgccactgcactccaggctgggcaacagagcgagactctgtctcaaaaaaaaaaaaaaaaaaaaaaaaaaaagaaatacttaggagggaagaggtagaggtgaaataagtggcattcataaaagcagagggccttgaaatgctcctaatcaattcctccacatagggggatcagatgcaataagcacaggcacacgattgtgtgctttcaagaaccgggtttgtggattccatccacacccaggagaagaaaaggacagactagaacaggagaatccttcactttctcctttttaactcatgatagttccatcatgtctgtgtaagagccaagcaaatctgcccttagtcatacaagtttgagttgggggttctcaagaggggaaaaatgactgacttcgtaacacagtcacctgggaagcttttggaaagtacatatgcccaggctctcaggtttacccttctgattctgacaggtcttcagtgggttggggagccattctggcacatacaaccccaccctgctgtctactcccaatgtgaaattgatgttggccctgaattggaacaaggaccaaccttggtaaggttaggtttgccagggaacaaaggaacccttcaggcctgtcgaaaccacacagactcacctgtatgcttggtcatgtggtatttcagctggttgacccacttgcacttgtagccacactcagggcacaggtacttccgttcctccttgtggatccgcatgtggtactggaagaggcaagagcaaaaagcagaaaatatagtaagtgctcaataaatgttagctgttattatccaggttattcttgccctgttctatgcctttatcatatggcaagcagacattatggaactttgtttttcttaatcttcagtttacttgctagggatttttttttttttttttttaaagagacagggtctcactctgttgcccaggctggagtgaactggtgtgatcacagctctctgcagccttaacctcctgggctaaagcgatcctcccacctcagcctcccaagtagctgggaatacaggcatgcgccacaatgtccagctaattaaaaaaatttatttttgtaaagacagagtctccatatgttgccctggctggtctcaaactcctgggatcaagcaatcctctggccttggcctcccaaagtgctaggattacaggcgtgagccacctcacctggccgataatttttttttttttttttttttgagatggagtctcgctgtgtcgcccaggctggagtgcagtggcgcgatctcggctcactgcaagttctgcctcccaggttcacgccattcacctgcctcagcctcgagtagctgggactacaggtgcccgccaccacacccggctaattttttgtatttttagtagagacggggtttcacagtgttagccaggatggtctcgatctcctgacctcatgatccgcccaccttggcctcccaaagtgctgggattacaggcgtgagccaccgcacccagcctcaatttttttttttaaatggagtcttgctctgtcactcaggctggggtgcagtggcatgatcatagctcactgcagcctcaaattcctaggctcaagcaatcctcccacctcagcctcctgagtagctgggactacaggtacttgccaccatgcccagctgattaagaaaaagtttttgtaatgggatctcgctctgctgccgagtggtcttcaactcttggcttcaagcaatcctcctaacttggtatctcaaagtgttaagattacaggcgtgagccacattatggaactttatctttacaacaaccctatgaagttggtattatctcatttttaacagatgaagaatctgaggcttggtaaaggaactttcccaaagtcacagagctaatatctggaggagtcagctatagagaaccaaggcagtttaactccagagcctgtgctccttccacttcctgccccatatcctctgacattaccttgagacgagagggatcagcacaggcataggggcagaggtgacagtggtaaggcttttccccagtgtggatgcggctgtgccaggtgatcttctgtcggttcttggtgctgtaagcacaatcggtgcacttgtagagacgagtgcccccatgccctttcacatggtgatctagtaccagctgatggcggcatgtgaagtcacaaaaggggcagtgtagcgggggctggccagcatccccatccccatctgaggctgccacggctgctgaagtctcctcatgctgttccaggtagtgctttaccaggcccacccgctcccgggcagcaaagtcacagagctgacagcggtggctgaaatgctgctgcctccggtgctcatccagagccagtcggctagggaaggcctcctggcaggccccacactcaagccgtgggtgctgtttacgggtgtgtcct

SEQ ID NO: 696 - DNA, 105 bp, Homo sapiens
gagacagagtttcgctcttgtcgcccaggctggagtgcaatggtgcgatctcagctcactacaacctctgcctcccgggttcaagcgattctcctgcctcagcct

SEQ ID NO: 697 - DNA, 324 bp, Homo sapiens
ttgggaattggatttgatttttattatttaatgacctcacgtttgggcccgtccccggctcccaacacttctgtatggtgcgccctgccgccccagcctggacgctctgcgtggaagtgcgtgtttgtagcagctcgggcctcatctcagcgctcggatccctcctgctgccagaatccactggcctctgtctcattcttgggttttcctgctgtcttcgtttacgtctctgtccacatgtcagtgtattaaaaccccaatgggttccgtttctccttttcccctctggattttaaataaatatttaaaactgaggcaatggaa

SEQ ID NO: 698 - DNA, 1570 bp, Homo sapiens
aaagtatcaacgtcctaatctcatgggcacctcttgggtctttccatttttgccttcatttgctaagtggcatgcttttgattttttgagatgaaactttttcccagcaaagtcttttccccacagtgatgctctgaaagccaggacacctagcacaggaccctgggcatagtatgcactcagtacatgtggagcatgttgatcaggaacaaaaggagtagcaaaggtcagttcctgcaaaggtgagtagataatacaggtatgactgaaaggctgcaactcaggagtaaacattttacattcattcaagagacaatttgcaactagtacaccaaaaaattttggcttgaagcagtactttggggacttggctaaactctgtaatcacttggagaactttaaacaatactgacgtctgggccctactccagggattttgattttattggtctgttgcaatttaggttttgggaattgtagggcctccgcatgtgactgtaatgtggagccaggggtgagacccactgtttcagggtgagggatgcattagctgtgtgtgatttccatgtgtgctgcaagtatttaacctatgaccactcctgcatttggagtcttggaaattgcagcaggaggaaatgtctctctacagatctattttttatgtcacttgcttttagagtaagaggttatttcaggcacagtaatttgatttaatctgttttcaaatactaaatctgaaaatactaaaatgaaaagaatttgcaaatgtgagaatttgcaaacatgtggagtgtgttcttatgtgctttccagtttctctgatgataagaaatgagtaatgttgggccttgatttcctaaactcagccctcagtcactttctcaaattatttgaagaccttccaagttgcttcagaagcattgtccaaaggagattattcccagtagtgaagaataatagatggatgagaatgtctaaggaatcctacttctgtcgcagaagtggcactctccagaacctcaagggcccatggagttcatgggctttggagtcaggcagagttgaccctgagtcccatcccagcctcttaatagactagttacttgacttggaacagttatgcaagacaaagcacaatgatactgattgcagtaatgggaacaattcattcctctctgtatccatgccctttgcaatgcatgtttttagctactcccatggagggaaagattctgtttttccagtccttggatctgactggccttatttgctgtggccaattcatacttactgttctagtgaaacaattaggcatgttttgctcctcattctagactttaattaaaattaaaattttatgatattttatttctactgtattttgctgtattcattctgctcagtattctagttcaccggtcctcttatctctgtttaatttagtggtgaacctatacattgtctggtaacttaattttgtattttcgtattctattgggctgtcgttcaaatgtggcttttaaacttcagttacttgttctttctacaaaaataaacattgattttctac

SEQ ID NO: 699 - DNA, 6072 bp, Homo sapiens
tccaaaaagtgatattggatggatatgggagctgtggccctcagaatttaaacttaaggaaagagtgggaaagtgagggtaagtgtgaaggtcacaatggatattatgatggacatacaaaatgtaagacaactacctataacaaaaacctcactgttacaggaggtcaaaaacatgaaaaaactcaatttatgtcagttgctttttctaaaccatgtgtttctgtaagtaagtgtcaacatcaatttttgaaacttaccttttcttttaaaggaaatttggataatccgaatagtgacttagtccatgtttcaaataatcatttaaaccaattaaaatatagaactggagtaaatgttcagtcaaatatttctgaaaaggagagatttaaaaacgaggaggtgatttctaaatatgatcaatttgatggatctttgttaaaagtttgtttcaccaacaaataacacctcgttctgcctgtgatcaatatagaaaggtcttcattcattcatcattgcttaatcaatgtcaaggaatagataatttgggaaaatatcacacacataataaaactttgacagcctttaggcaggactataccctaaataattaccagtatatttgtgttgcagagaaaaatcagtacaataaatctgatacaacattaagccaaggcataagccccagaagacatcagaaaactcattttctacataaccattgcaaacgtaaaaaatgtgagaaagcctttcatgaatgcaccaaccatgtccatcagagtatctttattcaagagaagtctgccaaatgtaataagtgtatagaaacttttatccagtcatcaaaacatactcagcctcagagaatccatattggagaaaagtcacacagatgtaataatggtgagaaaatccttagtaaattgtcaagtctaagaaaacataagataatccataatgaagagaaaccttacaaatgtaaagaatgtgacaaagcctttaaccatcgttcacaccttactcaacatcaaataattcatactggagagaaaccatacaaatgtaaagaatgtggcaaagccttcaattctagttcatattttactagacatcagagaattcacactggagaaaaactttacaaatgtaaagcgtgtagcaaatgttttactcattcttcaaatcttcttgtgcatcagagaattcatactggagagaaaccttacaaatgtaaagaatgtggtaaatcatttaaagtgtcttcagcccttactcagcatgagagaattcatactggagagaaaccctataaatgtaaggaatgcagcaaagcctttaactgtaggtcgtacctaactaaacatcagagaattcataccggagaaaaactttacaaatgtaaatcatgtagcaaatctttttctcgttcctcaagtcttattgtccaccagagaattcatactggagaaaaaccctataaatgcaaagaatgtggcaaagcctttaattgtagttcacgccttactcaacatcaaagaattcataccggagagaaaccctacatatgtaaagaatgtggcaaagcctttaactgtagttcatcccttactaaacatcagagaattcatactggagtaaaactttacaaatgtaaagcatgtagcaaatctttctctcattcctcatgtctttctgtgcatcagataactcatactggaatgaaaccatatatatgtaaggattgtggcatctcctttaaccggtcttcaaaccttagacgacatcagatgattcatactggagagaaaccctacaaatgtaaagaatgtggcaaattatttaatcgatgctcaacccttactcgacataaaagtattcatactagagaatttctatagttgtagtaaatgtgaaaagagttttatccaaaatttagaacttaaaaatcaccatagagtttatagggaaaccgactttacagattgaataaatgggaggaagtatttaatcagaactcaaatctgaatgtgtcaggacttacacaaaaaaggactaaagcacagatccccactttaaaattaaataagagtatttgttatggaggattactctaaagccaaagcagttacttattttgttatgtgtttcaaatgagcaaaagcattgatgtttggacaagtaattattcagtgagcatgttatttgtattgaaaacatttgaaatttgtataaagcaaatcataatttaattctcagattagttgttataccttaatgcctagtgtttatataaaaacatatagtctattttttctgcatcagagctgtaagaggtcgttctatagtaggtgaacatcattaatatcaacttattttcttggaaatttaatggcaaatgtaaaatacatgaagaaaatctaaaagaggctctttgtgtttgaatcattaaacagtaatatgtgtaaacatatagtacatatttagggcattagtattctatactaaagtaaaagaggaatattctgaatttatttattacatcaattgctccttaagtagaaaaacactggtcagttatttaaaatactggcatacctttatagtacaatgaagtagtaatcttgaatattatttgatgtgttaaaaataaaaacatcttcacagatatcagagaaaagtgaaaactcatatctgaaagattataaatatactttatatcaattttccagagaacttaaacttctaataatattggtaatattctcatggttactattttatattctttcctgctttttgtagctactggtgtactatgacagttataataaagattatatgggggtatacttaaatgccatacttttaaaatcctgaatcattgtttataaagttttattcaatatttttctttgcacatgccctttttcagtccaattgaacacttagagatttttctttgctttcacttgcattaaatggaatatacagatgtactaagatagaaagaaaaaggtgaaagagaactatacaggcagaaatgcatgtgtgtgtacctgtcttcaaatggaaaagaaaatgatggatcacaacaggaaactggagaactgttgatttattacagttctcaaattagaaacctcccaaattcttaaagctaaattagcttttcattgcacactgaatttttctctgataaatctaatgtcttctgggttcagactttatcccgtacaaatccttttttcttgcctgtgattcatgtgagaagaattatataattttcttatttcaaagcttataaactattacttataagttctcatggattttaagaatgtttttgtaaaatttaatggtgctgtccaggtgtggtggctcacgccggtaatcccagcatttcgggaggctgaggcaggaggatcatttgaggtcaggagtttgagaccagcctggccaacatggtgatatctcgtctctactgaaaatacaaaaattagctggatgtggtggcacacacctgtaatcccagttactcaggaggcaaaggcaggagagttgcttgaactgaggagatgaaggttacagtgagccaagtttgtgcctcacactccagcctgggtaacagagtgagactctgtctataaacaaacaaattatctgtcatctacctatagacataaccctactgaggaggatggggataaaaggtctgcatctaagtcactttgaaaaacagtattttgattgaatgctgtaagactacacaaatgctgtattctactgagtaatattttattttcctacaaggatatgcattagcaattctgaaacagttttacatgttattatataatatatggaggctgtttctcagtgtagttcacaaaagttaaatggtgaatgctagcatgaatcttgtggtcctagcccaaagttggaaatatcaggatgaacccatgactaatacatctggatggatggatggatgaatagatataaagataggtaggtaggtaggtaggtaggtagatagatagatagatagatagatagatagatagatagatagatgaagcgatgtctaagatatctggaaggatggatggatggatggatggatagttagatagatagatagatagatagatacatagatagacgattcagagatagataatgttccaaactcttgagggccaagaactggtgacatcttgtatcaacacatctaggtctacaatcttggtttctaaacaacattcattaaaaggacccaagggttgaagttagaaaatacaagttgagctagagtatcttgtaaagccacaaagaaaaaagtgcttaataaaaatgatggggacttttcaaagggagccaacctgaaagacctcccaatggtccaagctccaacaatatgagcaataagttatgatagctttggattatggcccacagaataaagtaatactcatctctactgtgtgaataaaagagattaaataaggaaagaaggaatgaaatctacaatatttaaaatacagatcaatgtagttggataatgcaaaataaatcaacactagaacatcacagtaataattaccatagggaagattccccgaggaattcaaaaatttcaggaaaaacttaaacactaaagagtgtatttgggccagtctcggtggcacatgcctgtaatcctagcactttgggaggcctctgcgggtggatcacctgaggtcaggagttcaagaccagcctagccaacatggtgaaaccccgtctctattaaaaatgaaaaaattagtcgggcatggtggtgggtacctataatcccagctacttgggaggctgaagcaggagagtcacttgaacctgggaagcagaagttgttttgagccaagatcatgccattgcactccagcctgggcgacaagagcagaactctgtctcaaaaaaaaaaaaagaaaagaaaagtgtatttgcatattttaagtatctaccatctaatatttattaatacaattttttcttaatttcttagacttgtgactatttgaaacaaattataacactgtattgtaggatttataatttgtagttgtaaaatttataacacatggaataagaagataaatggaactgttctgtagcaaatttttcatgttttatatttaagacagtatagtattaactctaaaagtatggtggatatgttaaagattcatattgtattccctgcagcaaccactaaaaaatgcaaagaagtgtaatgtaaatgctaaaaaaggagataattataaaatatttatttgcacaatatttatgtatcttttagtcataatagcccaaaacaggaaacaaccaaaatgtccattaataagaaaatgaactaattgtatagcttttagaacaaaatacagctcaggaatatgaaaaaccaagcacacatcctggataaaattcataaacctgctcaatgagagaaaagttggacacaaaattgtactttatgtattttgtattttattccaggcaaaataatcctatggtgaaaaaaatcaacaagataatctctgcttgagaaaaaggaccaaagacaagtgaattttctgagggtgatgaaagtgttgcttcgaaaaggggtgaagtttatatgggtctatttatttgtctaacatgtacagttaaggtttatgccttgcaatgtatgtacatcttcacaaaaaaaatcttaaaaaaattaaatgggtgggggtagggaaagggttgaagtatagatgaagcagaagtggtacatgattagtagttgaagctgggggcaggtctatatattttatttttatgtctttaatagcatttgtataaatgtacaatattcgtttacaatgttagctcaggatcttgtttacctttggacagggagggagggagaaatttattttctgggtaggagtaaagctggttctattcctcagttatgtaaattatctgttataatccaaaaagctttacatgaatgtttctgtatgtaatgtggtatatcaataaaaaattaaatattacatatttg

SEQ ID NO: 700 - DNA, 6694 bp, Homo sapiens
ttactattggtaattatggtaactgcctgccttttccttataacctttgtctgcctctgtagaaggaggatgggcttttgcccaaaccactctcttctgggggagaggaagaagaaaaaccccggggcgaggcttctgaggacctgtgtgagatggccctggacccagaactgttgcttctgagggatgatggagaggaggagtttggtatgttgagtggtgagaggggagcttgcaggcttgggatgtggctttccacctgtggccaagctggttttcatttttgtactgtggagttgggtgggccctgctctccatttatcttggcctttctgtagcaggagcaaagctggaggattcggaggtccggtccgttgcctcaaaccagtcagagatggagttctcttcacttcaggacatggtgaggcctcttctcgaccactctgggtctcagtggtggtgaggcttggcaaggcctctggcccactcctgggagaaggatgcttaccagtgacttcctttcttgatggacccaacacacagtgtggtccttggctcatggaagggcacgttcataggctccaggagaacatttcagtgtctgttggggtgaatgggagaggggtatttgatcctctcctgagagaggagcacaggagcttttgccaaagtgggccagagaggaaggctggcttgggcgtgatgaacatcaggcaaggtgcttgatgttttgttttttagagacggggtttcgctgtgttgcccaggctggagcacagtggttattcacaggcatgaatatagtgcactgcagcctcgaactcctgggttcaagtgattctcctgccttagcctccccagcagctgggacttcaggcatgcatcactgcatgtggcccaagccactggattctggacaggctgaatcctgggcgatagagccactgagggaactatttgcaaatcctgctcatctttgttttctttgcagcccaaggagctggatccctctgctgtgctccccttagactgtctgcttgcttttgtgttctttgatgccaactggtgtggctacttgcaccggcgagacttagagaggatcctccttacccttgggatccggctcagtgcagagcaggtaccttctttcctctgccccagcacatgggcacaggcctgcacttactcctgctctaggttcccgcccatggccagggtcggggacggggccttctgatcagcagatgtgttttctgcaggccaagcagctggtcagcagggtggtgacccagaacatctgccagtaccggagccttcagtacagccgccaggagggcctggatggtggccttcccgaggaggtgctcttcggtatgttctggggccctgcagccttcctggggcacgggcagggcaggctgccctctctggagactccatcctgaattctttttcacggttctctctaggaaacctggacctgctgccccctcctgggaaaagcacgaagccaggtgctgcccccacagaacacaaagccttggtgtcccacaatggcagcctgattaacgtggggagcctgctgcagcgcgcggagcagcaggacagcggccggctctacctagagaacaagatccacacactggagctgaagctgggtgagggcctggggctgcagccaccatggggtcacatgcagaccagtagggaacctgctgcttaggctcaggccctgccctgtgctctgggccttgatggagcagccgtccccgtttccttctccaccttgcagaggagagccataaccgtttctcagccactgaagtaaccaataagacgctggcggcagagatgcaggagctgcgagtccggctggcggaggccgaggagaccgcccggacggcggagcgacagaagagccagctccagcggctgctgcaggagctccgcaggcgtctgacccccctgcagctggagatccagcgggtggtggaaaaggtaaggtgggggtggaccaggaggcagcacagctcctttccctgagctccaaaagtccccagaagggcgcttgcccgtgtcgggagtgaccagagggccagcaggcaccggcttcgtctttccatcgcttgccaggcagtgtgcccctggttgcaggttctctgggaattgagcagtcagcagcgtgcagtgggagcttcccagcaggaggcagtccgcagtccgcagtcctcagatcaccttgccaggcccgattctgggtacatcatctgtttcaaacaggctgacagctgggtggagaaggaggagccggcacctagcaactgacggcctcgcacggaactgccatcctgtgagggcagcggtggcgcccggcaaagttggagcccttgcggtaccagaaagcagcgagagcgagacctgggagccagggcaggggtggctgaccccatgctcagcctctaggggacggcaggccatcaggctgggggctgtgctatgtgggatggatgtgtgaggaaccccggttccacttaacaactaaatacaacatcttttgcacccctagaatgtcattttgccctcaaccttggtatttctcctggggcccttttagtcttgtgctgactttctcctgtcctcttccagtttagaataagacaggggagaaaaaggcttttcgagtgtgggacaaggtctgatgtcagtgaacggaactgaagagcaagacatggagcctggctggggctaagcagccccctcctccggatggcacaggctctgctaggttccggacacaggcttctgggggaagggtctcccttggccatcacgggaatggagtccatgctagaaagagctcagtgttgggctgggtttgccagtagaacactgcgttccagtcaccccggtcttgccagaagaaaccagcacctctttcccgtggctcctgtgttcagaatgtggtattggctctggcccagccttctcccctgttacccataattcttgcctctttccataatccgtggtttcagtttgactttgtatataaagttggggttttttttttttttttttggcttgttttttaaataaaccaaagtcaaaaacaaactgagagtgtgtcctccacagctcttcctactctcctaggcttgcccgcgtgccctcccacccagcgcctctgctggaccacggtgcagttcgctccagaaggtgggccagggccggggaggtgcgcacacacccctggcatgctgggctgcctgctggagggtgctgctgctccgtggagggcagcaggcccaggaaggggtttcctctgctcgcctaagttacagcacaatactatgtggacgtttcattgaaaattttacttgaaaaaataaaattccagatactcaggtgagacacaaacccactgttcctgctttgagacctgtgaattcttgtgggacagttccactgacagcttgcgttcccgaggtaccagtcctcagtgacctcgggaaccccaaccacttaggtcccaaagccacaagggtgccctttgtcttgctgggaagctggctgagggcctgccagggctggaggaccagctctcccgcacagggttcagggcctctcccagaaaaaagaggttttgaagtgaaaaggcaacgaggggccagagggctccccaggatgggtcttttggaggtagatttgatgcccacaacgcatgcaaggctaagacccccaacttagccaacgaagcccatggcctcagaagggctgcagcttgctcaggccgtgggccaggatgcatgctggacggttctccaaataaaaaagccccaagggtttgtctacactgcttacctgctggggctgtgagtggggagacggcggcctgcctagggctcctggtgccaggctcaggaagagtcattcattgcaaagggccggcaagtgaaccagggccacctctgtccccagcctgtgagaggagcagctagccctgagaagggcaaggatgaatgaggctgaccacgtcacaggagtcctccaagagtgacggggattcagtcatcggccacaatggagagggcccggagctcactgagtttggcctcgttctcccgctcccgctgctcatcggagtggcctggctggtcaagctgatgggacaggtctccaaagatcttgtgcatttccgagtagtacacaacctgggggaggcgacaggggttggcacgtgctggctccagggaaccgtgtgcttcagggggccagaggctcacacttctctgctaccccctgcccttacccatctggagctgtgcagcagcgtgcctttggggatatgcagggcacggaagggctctagctgagactgaaccaaaaggagccggggagcaacagggcctcagtggctggaggtggaggcgcccctgcttcgggctcctggttcccccagcagcaggtgcaggaaggcatgggcctcctagggcgactgtggaatgatgggcaccatgactggagttttactgctttttgtaagctaggggagaacccaaggcttttgtccatggcagaaagacagcatggtaggctgatggctcccaaagccctaagccagctttagaggcacaggcaagaaaggggatgcccgtctagccttctgttccctcccaacttgcatcccacccttgctcatggcccaagctgcgtggccagggggacagctcagaggccaggttcactgccagggtccctctagggaggcaccagaaatggtgtgggaggggacacagggttgagggtggggcaggtggaggaatggggaagcccgtcaattctcccagatggctgaggaccaggggcttttccacagacaataggggccacttctgcctcagtttctacctcatgacccaatgaaagcatgcagtttcctgaaagcttccacgtttcactctagacatgaggaggagctctagacactaaggggaccttgtgggaaatgccaggtggggcggggacccacggctgatactcctgaggcgagatttccgccggccgagggggtgctaaagtgagctggtctcaacacactgctgtcacctctgggctggcggcggcccaccctgcccccactccctgcccaagccactgtgcgctgagtcactgggaatactcacttctccatgactaatggcagccgggcgggcgagggggaggctggggcccaagaggcagtcaacagcccccagcaatgctgcctggttaaagggcatccctggcctcccatctgctccaacctggacacgcgggagcctggcaccctgtggcttcctcctgtgagcaacaggagggagggtgcagggcagcacccaggtgacagtgaggaagaggcaggcccaggtctcccgtgaacccaatggggcggctggagggagccctcgctgcaggagcaagtgtcaggagaagtccctacctcctcctgcagaaggctctaggtctcactgccccctaaagatggcacaggaccaagtacgtgggtcactgacaaggtcccgccccggcatgaaccctgctcaggtgtcctgactggggcaggtggccaccctgactttggcccggcagggtgggtgtgcactggccaggcttcacggctgcgactacgggcctgcaggaaatggccactggagggcgccagacgcccagccacgctcagaccacccgggccaggaggggcagagccacagggacctggcagggtgccacgggtgttggggtactaaggctgttgctgagcgcaagccatcagcagggtcctgtgtggaagggacccgcttctggcatgggtgcccacccttttctattttgccagttgggggaacaatccttcctaaaggcttgaagatggaggagggtgaggagcatgccactccgtgtcctcccgtccccgagtggaaggagacgctggggcctggcccgtgtctgacccccagtggcgcccccatgcctccaggcctgcctttccaccccagggccctaggagcagccctgattgtggctctccccagggctctggagcccccttccttagtggttccaaggcaggactcccgccgtttcctgctaaaaagactggctcacggtaggcaggggaggggagctgagtcctcagaaaaggcctccattctccagatccctttcttctcggcaccaccctgggccaagaaaccgcccacttgagggtgcggggcagaggagctacttatagtgaaatgtagagagatccatggcggaactgctggaccaaaagggaacctcggccattcctggtatgggatttaccagagagcaatgtgaggagtctaacagcagacaggtcccccaagtcgctgagcctgggactctggtaatggaatgaattccttcagggctttgcctggggtgggtgccctgtctttacggagaatggctaagccacccttccagtgtgggtgacagggagtggcatgagctgtgtataccaagcccaggggaagagcacctggcggcctcacctgagctcggatgagggactcaaagctgggctggaagtagtcgaggcggctgccgtagaagcgcggcatctcctccagcagctgcctgttcttggcttcaaagtcctcccgcacaggccgcagctcctctcgtgcct

SEQ ID NO: 701 - DNA, 976 bp, Homo sapiens
caggtgaggggagggacttaccacaggtgaccacgatggcccacctgtctagcccctgcccacctgtctcccctggtacctggtggagcttggccagcactggccccgtcttctccttttcctcatacttctccaccttggcctgcagcctcctgtagtcctgcaaggcctgttcccgcctcttcacagccatgttgaggctcgggaagacactgccgaacctgtgggacaagctggctggagatgggcccgttcttgaaggggtggcctggctggagatgggtctgctcttggaggggtggcctggctggagatgggtccgctcttggaggggcgtcctggccagcactcacttgtccaaaaatgtgccctgagcacctaccaagcgccagaccctgctctaggtcttggggagttcactgtgaacaagacagatgaggccctgtcccctggagcttgtgcgaacgtggacaatgtcatggggtgagggcagatgagaggaggtggggttgtgggccaggtccagggagctgggtggcacagggtggcccaggaatgaagggtgccctgacccccacctcctgtgagctttatcacacaacggactaggggatggtggggaaggtgccttgaagtcatctggccaacacctcacttttaaaaaggagggaaactgaggacagagagagatgacctatgactcatccaaagtcacgatgaggcagagaaggtctagaagagaacacaggtgtccacattctctgtctggcaccctttccagccctcacagtgccactggcaggtggcagaactgaaatctaaactcacccctgccccagggcaccttctccttcaagggctccttggcaacatgaaagcagcagaaatcctctggctctgccattggaaccgccaaagttccaaccagctgcttcaggaaaatgccctgaggacctccactgtgactagaagggac

SEQ ID NO: 702 - DNA, 693 bp, Homo sapiens
agcccacctctgccacttgctgggtgaccttgagcaatcacttagcctctgtttcctacttagaaaatggggatgactgtgtttcttgcctcatggaaatgatgtgagattaaaggacatgatgcatttagatgccaagaacggtgcctggcacacaggaagcacccattagtcattcactgctatgtttctcttgtttttgtcatcagtcttcatgagctcaccaggtgatgggagcctctgctgcacctcctgatccttttcactccaacagcttcaatcactttgttttgctgaatttttcagaaatctgcgtttttccagaaattactgcaaaataatcttccttccttctgtatcctagctggattacaagcctgttagaaaccaggactagtttcctccatgttctacaaccctccttcttatatgtgtattccatgaagctacctagaaaaaatgacacttgttcatctcctctccctctcaagtcctgtctttcctctgtccctcccctctggctcagtcctgtttgtccttaaaagctcagctctgccctcagcttttccaggtgccttccctgaacctttgagctagactcagtgatgtcctctgcccctccgaacctcatgcacactcctgtcgctgggcttgttacattacaacggaatgcctctttgtgtatcttttccc

SEQ ID NO: 703 - DNA, 693 bp, Homo sapiens; identical to SEQ ID NO: 702

SEQ ID NO: 704 - DNA, 293 bp, Homo sapiens
tgactctctcttcatttggagtcatgccttgccccatgaagagtgtctaagaggtgagcgcttggggcaagcccaggagcatcccgagctgtgagtcagagagatgtgcctgatggcaagtgagcgtccctggctaaacagactttcagtccctgcagggctgattcacatccgggacaagcattacatcttatagctcttctaccctgcacaccacttggggagcaggaggaatggccctattccctgagaggggcgtcagttccaaggagccatcttgctgaggcatggca

SEQ ID NO: 705 - DNA, 293 bp, Homo sapiens; identical to SEQ ID NO: 704

SEQ ID NO: 706 - DNA, 372 bp, Homo sapiens
cacaaatcctcacagcagccattgattattattcccatctcacagaggagcagcaggattcagagccttaaggaatttgcccagagttacacagttggtaggggcagagccaggtgacaggcagtctgacccctgtgctgtggactccagtgttatgttgcactcagtatatgtccaagccacatttctctctttttctttctgtcagagcgtcatgatgcattgtatgtggtgggagcgctggatgaaacactggagctgagaggattacgataccacccaattgatattgagacctcggtgtcccggatccacagaagcattgctgaatggtaactccctcagcatacactgtgcttcccacttcagctt

SEQ ID NO: 707 - DNA, 428 bp, Homo sapiens
agccacattttaaaaagtaaaatgaaactggtaacatttatttaacctgttcaaaatattatcatgtaatcaatataacaataaatgggatttgatgtcattaatattaatattaataaggtatcctacattatttttttgtacgacatctttgagatctatggacactacattttacacttacatctccatgtggaccagccacatttcaagtgcccagtagccacatgtggccagtggctaatggagtgaacggtgcagctgtgggcctctgaagggcagaagccacgctgagtcttctgtctgggtcccctgcttcctgtcatgcttggcctaggggagagcagcgtagcattgttgatatgacgtgggctgggagctcagctttgccacttaacagctgttcactggctgaccccattgggctc

SEQ ID NO: 708 - DNA, 428 bp, Homo sapiens; identical to SEQ ID NO: 707

SEQ ID NO: 709 - DNA, 616 bp, Homo sapiens
ctgggcctgtgcccacactctcgctcttagaaccccggactacagtggggtcagatgggcaagtggctaatggctgttgagctggccgtggagtttatgatgtgctatgggaatgatggtctgtagactgatgttgggtcaggggcaggggcagcaggggtgtggtggagtgagcgtagggctgggctgctgtgggagccagttgctgctgccgactgatccctggagcctggaagctgcaggtgtgccgggctccctgtttctctgccgggccagtggctgagacctgagtctccatcaaccatgtggatctgtagggtcaagcaagcctggctgccacccctcctgtctcctctagggcctcctactccttgggaccccttttacgctgccccctcacccccagtctgggtgggcagtggttattggtaccggggtctgttgtcccctccagatggaggacagggatcttttccacctcacctgtgtccccagtgcccagtacaggcccaggcacaaataggcccttacttcagagaactgggtgaaccaccaagtgagacaaagtggtatctgaactcccacagccaccacagggcagcaggaactcagaggc

SEQ ID NO: 710 - DNA, 616 bp, Homo sapiens; identical to SEQ ID NO: 709

SEQ ID NO: 711 - DNA, 287 bp, Homo sapiens
caaccagtcagtgatatcccatactttataacttgcaagcccctggccccttcccatctactaacttcaatgatcctgtgaggtaggtgcaatcattcctatttcacaggctcaccctccaagggtccaatgagaagccgccccagtccctcttccctctggcttctttcccccaggaagatgtgcgaccctggcatgacagccttcgaacctgaggccctggggaacctggttgagggcctggacttccatcgattctattttgaaaaccgtgagcaattccttct

SEQ ID NO: 712 - DNA, 292 bp, Homo sapiens
ggtgcgcaggtgcgtgtgcatgtatatacctgagtgttgcataaaagcatggaaataggctgttaagctggtcttgcaaccagttctagaaagaatggacttggaatgtatcatgccagtggctctggaaggacacagccagggagtgaaggaaagagaggtggcccctgtggtccccaagctcctcagtggcacttctgggggtcctggggaacccctcccacctatgtgatgtcacctcctctgacatctgcagcctgctctaggttctgaccccttgtcatgacctctg

SEQ ID NO: 713 - DNA, 145 bp, Homo sapiens
gagtctcactcttgcccaggctggagtgcagtggcacgatcttggctcactgcaacctccgcctcctgggttcaagcaattctcctgcctcagcctcctgagtagctgggattacaggtgcccgccaacacacccggctaatttt

SEQ ID NO: 714 - DNA, 336 bp, Homo sapiens
cacatattgatatttattttatttttcatgccctttcatttttctgtcatttttcctattctttactcttccccatgccttctaggaatgtttcaaaccactctccatcttattaattcattcatcaactgtattcattcaaccctgaattaaattgtttgtttctactatatctggttggtccttttttataactccttgtccctatttgtttccagtgccctcctacatgcccttgagaatatttgttaggattattgtaaattcttgttttctctggctcatcagttctgctccctccagaattagttgtttagtttgtgatcctgccttttc

SEQ ID NO: 715 - DNA, 336 bp, Homo sapiens; identical to SEQ ID NO: 714

SEQ ID NO: 716 - DNA, 334 bp, Homo sapiens
cacatattgatatttattttatttttcatgccctttcatttttctctcatttttcctattctttactcttcccaatgccttctgggaatgtttcaaaccactctccgtcttatgaattcattcctcaactgtattcattcaaccctgaattaaattgtttgtttctactatatctgattggtccttttttataactccttgtccctatttgtttccagtgccctcctacatgcccttgagaatatttattaggattattgtaaattcttgttttctctggcttatcagttcttctccctccagaattagttgtttagtttgtgatcttgccttt

SEQ ID NO: 717 - DNA, 147 bp, Homo sapiens
tgggactacaggcccccgccaccacacccggctaattttttgtatttttagcagacacggggtttcactgtgttagccaggatggtctcgatctcctgacctcgtgatccgcccgcctcgtcctcccaaagtgctgggattacaagc

SEQ ID NO: 718 - DNA, 147 bp, Homo sapiens; identical to SEQ ID NO: 717

SEQ ID NO: 719 - DNA, 921 bp, Homo sapiens
actcctcccacagtcatccaatatgaaatagatcatttgaatacccctataattattaaagaaattcagtatctaatttgaaaactcccattaaaaaaagtctttaggcccaaatggtttcactggagaattctatcaaacatttaaagaattaatgtcaattctacatactcttccagaaaaacagaaagggagggaactcttctgttctctcttctcttctctgctttctcttctcttcttcttcttttttttttttttttttccttgagatagggtctgtctctgttgcccatgttagagtgcagtggcatgatcatggttcactgcagcctcgaccttccaagctcaagcagccctcccaccttagcctcctgagtagctgagactacaggtgcctgccaccatgcccagctaattttttattttgtagagatgaggtctcactgtgttgaccaggctgtcttgaactcctagactcaagcagtcctcccacctcagcctcccaaagtcctggaattataggcatgaaccactgcacttggaatattttctgactcattttgtaagggcagtattgccctgataccaaaccagacaaaaaacagtgcaaaattaaaagaaataacagacaccaatacaaacataaaattcctcaggaaactattaggtaacatattcagcaatatagaaaaaattatacctactgtggctgtgagaataaacaacaaaaaaattatacaccgtgaacaagtggagtttgttctgaggatgcaaggctggtttgatacttgaaaatgtaatccattggcaggagaatcacttgaacccaaggaggcggaggttgcagtgagctgggattgtgccactgcactccagcctgggtgatggggtgagactccatcccaaaaaaaaaaaaaa

SEQ ID NO: 720 - DNA, 100 bp, Homo sapiens
agtagagatggggtttcaccgtgttggtcaggatggtctcgatctcctgaccttgtgatcctcccgcctcggcctccaaaggtgctgggattacaggtgt

SEQ ID NO: 721 - DNA, 17687 bp, Homo sapiens
tgtgttcgtgtctaatctctgctaccagactgaaagccccttgaaggcaaagcctacatcttctttgatctctcacagaattgaataaggacatagaccatagactcagggtagcacatctcattcaacctcagccatgtagacctttgactcaagacctcaccattcaggggaggaaaaattagagttctgtgggtgtttggtatatctctagtttgccagagaaatacatagaattaacactacaggaatagggaaaactatgggaatgctgtggcaataggcaaaagggggttctattatgcagcctccagaattcctgaatctatctggagaaagaaaaatgctcacccttgcttcctgctttcattttcccacatctgctttttatcatagtcagtctcctcgctggctgttcccaccacactcaacaaaaactgagcacctactgtatgccaggcaatgtcctcagtgctagagatacagagatgagtgagatgagcacctcctgtgtaccctctctgctatgatcctgagggtagaccacccttgaccatgtcagcagtcgtacagtgtaatgtgctcaggagcacgcacatgcaggagcacgcacaggagtcttcggcgctagccttgtctttgaaagtcttttacaccctatgctctttagaatgcctttggatcgtacagtccatcattcctactcgatatgtggcctgggatcagggttgtcttcgcagttattttttacttacaaggatgttgtagctgtgaagtagaaaaattctcacctccctttcatatggtcagattctcctgtttttatcttccttagactgtgggtgcagctgacttttctgtggtttgttgggaacctgtgtttgtaagcctgtctactctcatgtgtctgttaagtttgaatcctaacaacactaaaaccttttcattaaagcttgttagcgtggagtttctatagggagaacaatgccaggggtgtgaaggtaggagctcaggaattttctgatttcttgctcaccttttttccttatttttccttttgttcctaaatacataactgtatccattaggacccttagcttaaatataagctcaaggcacagtcttcttaatagtgagtgaccttctctttctcacaggcacttaacgatgccaaaagggagcttcgctttcttttggtttatcttcatggagatgatcaccaggactctgatgagttttgtcggtaagtggattgattattttccttctcttttctgactctttctggtgacagtttatagtcagcaagttgttctcatatccttttcatacctttccacagcaacacactctgtgcacctgaagttatttcactaataaacactaggatgctcttctgggcatgctctacaaacaaacctgagggatacaggggtaagttatgtttcttctgcctcattgagattgttggagtatctttggaatagtctggaaagacatgccatgccatttattacaagtgtgtttgttctgtggtagatacgacgctagttgctattttatattgtctcatttaatcctctcagcagtcctgagagatggggggtcatattacctttgctttatggtttaggaaataggctcagagagttcaagccactggctgaagatcacacaattagcaagttttattttttttgtttttatttaattaattaaaaaaatttttttgagatggagtcttgctctgtcgcccaggctggagtgcagtggtgcgatcttggctcactgcaacctccacctcctgggttcaagcgattgtcctgcctcagcctcctgagtagctggaactacaggcatgcaccaccacgcccagctaatttttttgtatttttagtagagatggggtttcaccatgtagcctcaaactcctggactcaagtgagcagcccacctcagcctcccaaagtgctgggattacaggtgtgagccactgtgccccgccataattagcaagttgtagcgtacagtcgggtctgccagattctaaagcccgttcttcacattcagcattgccaaagcctgccacattcatagaaatacccagtcttggctagcagcttgcttttaatcttaatgggctttttactgaagagtttattcttttcatcaacgattttaacagagcccttgcatagtgagtcagttgtttgagtaccttgagtgctgatatggatttggaaagttcagatctttgctgacaataactcttctttggagataagtatttttagacggttagtaaaagatacgaaggcatccagtgaggaaaaatgtagtcatttttgtggctacttctatccagcaacttttgagtttatattagcatgccacatactgtgccatgtcttgagaaccaaagatgtggcagatgttgtccctgcatcccagagtctgaatcttaagcctaattgtttttaaacatccaaattcctgcatgcgttttgccattctaatatggctttgcagggggcagaagggaggttgtgaatagaaggaaggtaaggatttttttttaatagaagtttataaaatctcttatttcacaccataaggaaaacataggtaaaactctgttatggtaaaaatcttggtcatttggacaccaatttttttttttttttttttgagaccaagttttactctgtcacccaggttggagtgcagtggtgcgatctcagttcactgcagcctccacctcccgggttcaagcgattctcctgcctcagcctctcgcctatctggaattacaggcgcgtaccaccacaccctgctaatttttgtatttttgtagagatggggtttcattatgttggccaggctggtctcaaacccctgacctcaagtgatccaaccacctccgcctcccaaaagtgctaggattaaaggtggagctaccagcccagcctcaactttctattaataagcttctttggaacagaaaaactaacctttttaagggtggagaaaagttacgtggggagaaaggataaggaaaggattaggcaagagaaaaaaaaatgatgatggagattattatcagtatcatcaggctgagacttgcagccttgtgcccttttaggtttgagcccttgtacagggaaaaactgtgccagattctttatagatcctttttgtaccatcaagtagacattatccttaaactctgcagccttccctggcatcatcacaacaaccacaccgccaccaggaaagcctgtcctattctagtcaagcacctagggataggcatgcaaattgataacaaaaacaaaagattacaaaactgggaggaactgggcatggtggcacactcctgtaatccctgcttctcaggaggctgaggtgggagggtcacttgagcccaggagctggagaccagcctgagcaacatagtgagaccctggctcaaaaaaagaaaagaaagaaactaggaggcggggaaaaagcggagactaaatgatacctctcgtcttccccaaccaggattaaaacagttctctctcactcattgtggaaagtctaagggttgatctttttcaccgtcaagtcctgcccttgatctgttgggtctttttatcagtctcacaggctttacgagagaacacctatccattcctggccatgattatgctgaaggatcgaaggatgactgtggtgggacggctagaaggcctcattcaacctgatgacctcattaaccaactgacatttatcatggatgctaaccagacttacctggtgtcagaacgcctagaaaggtacaagggagttcccttctggaacagagagagaccagttgtaaatttggagggctgacctctggggctctaccaatcctgacttcttctgtgcatcaggccgctattagcttttagctttgcccatttattgtcaaaatatttacatactttgacctaaattactctatatcaggtaatctgttcttagagatgttcaaaataaagacaagggctgggtgcagtggctaacacctgaaatcctagcacgttaggaggctgaggcaggaggattacttgaatccagactgggcagcaaagcgagaccccatctctacaaaaaataagaaaaaattagctaggcatggtggtacatgcctgtagtcccaggtccttgggagcccgaggcaggaggattgcttgaggccaggagttcgaggcagcagtgagctctgattgtgcctctgcactccagcctggatgacagagcaggactctgtctttaaaaaataataaatgaatgaataaacaaagacaggcctctgtgctcaagaatgtatattgtggcatttagaatagctgaatataatataaagaacttcgatgtaaaaaaaaaagtggaatggttataattcctctccattacataagttatgtacattaattataggaaatcctaaaaccacaaaaaagcacaaggaagaaatttaagatcactgataaacctaccaccacttgaacattgttataaatttttttaattttatacacaacacacacccctatatacgtacacatttatttgtaaaattgggataatacttttttacaacccttctttatgtaagaatatatcacggccttttccctcatcattaaatattctgccacattttaaaaattactgcataacattccattatctaaatacatcataatttaaccaggccactctcgttggatttttagattattttcggtttgttactattataattagcatatagggagataattttttgcaatttgtgatggtttccttagattaaaatttaaattcctggaagtgcagtttctgggtgagacaatcaatataagtatattttaaggctcttgatttgtaatgccaacttgccctcaagaaagttaaacaaacttaaattttatggaaagtttttaataacatggggacatgcttgttacatattagaaaaatgcagaatcaggccgagcatgttggctcatacctgtaatccgagcatttcgggaggctgaggtaagaagattgcttgaactcaggagtttgaggtcagcccgggcaacatggtgaaaccccatctctacaaaaaatacaaaaattagctaggcgtggtggcacacgcctgtaagctgaggtggcaggattgctttagcctaggaggttgaggctgcagtgagtcatgatcgcaccactgcactctagcctgggtgacaggctagccctgtctccaaaaaaaaagaaaaatgcaagatcaaaatcctgtaaataatagcgttattttaactgtgtaaaaaaatgtatagaacaggaaactttccgaggtaactgaaatgttctgtcttgattggagtggtgattacatggttacatttatcaaaattcattgaattgtacatttaagatctgtgcatttcactgcatgtaaattttatcttaatttttaaagataaaatctgttcaactattttgattggctaaatattttggctaagagaaaacagaaatttgttggagagaaaataggagatatgccaaatgttataatgttttatctttgattagtgattctctgaatgactctgaaaactctacattttcagatctgctacaatgtgtgtatggatatatatgtgtgtgttttggttttatgagatcagtacaaaaatgcagtcacccaaaatggtatttacttgtaaaatatgatattgatgatcccttcataataacagtactgtgtcacatttgttagaattaggggaaaagttttattttaaaagaggagaggaaagcttgctgtttccttttctgccaaattaaactgagaaaaaaggtggcttattcagattctgccacgctctgcttttggaatcccttatggcagtgtgaaatcgtcatctgctaagaatatcaacatttttacacacacacacacacagaagatttcaatataagaaaacacagaactttgtgagagtgctgtttttcttctcttgcttttgatctattcacagggaagaaagaaaccagacccaagtgctgagacaacagcaggatgaggcctacctggcctctctcagagctgaccaggagaaagaaagaaagaaacgggaggagcgggagcgtaagcggcggaaggaggaggaggtgcaacagcaaaagttggcagaggagagacggcggcaggtaatggacgtgtggctttactccctgtggttcccaaactgccgagactttgccatcttggtcttaagtgtgaaaggaaaaaatgatagccaccttaaacagactaagagggaaaaaaaaaaaggaaaaaggaaagaaaaaattacaacatgttggaattaggggtgatttaaatttttcataccatttaaatattcattcttttttaaataaaaatttaaaaaaagagacgggctttgccatattggccaggctgctctcgaactcctgacctcacatgatctgcctgtcttggccttccaaagtgttgggattacaggcgtgagccaccatgcctggccctaaatattcattcttaataccagtattagctgatttggcattttactcattatctttttgtttttgttttgttttgttttgttgttgtttttgttccctagcaatcagactgagatatacattatcttatttgattatgtattaccgcttacctataaccagtgtcttttagtcatttccttttatttcttttttttttttaagagacagggtctcactgtgttgcccaggctggcgtgcagtggctattcaccagtgcaatcatggagcactacaccctgaaactcttgggcttaagaagtcctgctgtggcctctgaagtagctggaactacaggcacataccatggcaccctgctccctttctcctttttctcaaataaatacctagacataataaagaatacatgagatgcaattgtactttaaatttaggttgtttttgactattcctgagaggtttttcttagaatacttagtcattaatttttcttctgacgactgcgtaataaagctacatggtcattgtatttatttcttgagctgtagcctcacctttgctttgtgtctctgcagaatttacaggaggaaaaggaaaggaagttggaatgcctgccccctgaaccttcccctgatgaccctgaaagtgtcaagatcatcttcaaattacctaatgattctcgagtagagagacgattccacttttcacagtctctaacagtaaggaccacctaagttctgtgaagtgtatgtagcatctgggctatagatttggagcttttactgactcttgagagtggtgttggtgtatctgctgctctgatgaacagggaacagagagagagagagagagatgggtatgccatccgtggacaccaggaagagtaccgaggactgctgtaggctccttcagttctagtttccaactcaaagcaatttttaagtttttgtttaattatgtttcggctctgctaagaaaaaaaggtaccttacataagtccctcaaaagacttgtgtgtttgaagatgggaggctcttccatgctgtcttcctgcattggcttcagaatcccaccagaacccctgctctgtaggaaaagctctgtctccagtgacctaaaagcactgaagtgacatatctgaatataagtgcacttgcagtttggatgcagttgtctctctctttctactcagcccaaaggaagccccattttctgaggctactttatgtatatgatagccatgtgatagtgtttgtcatttccacatggaagtcattaaaagcagaaactcaagagcctcacagcatgaggatcaaattttcattcttccagggttactagatgtgtttccttagtcagtttatttaatttctaagcctcaatttcttcatctgtaaaatgggtttaataataagcacggctgggccccgtgctcatgcctgtaatcccagcactttgagaggccgaggtaggtggatcatttgaggtcaggagtttgagaccagcctggccaacatggtgaaacctcgtctctactaaaaatacaaaaattagctgggcgtggtggcacgtgcctgtaatcccagctactcgggaggctgaggcaggagaatcacttgaacccgggagacggaggtagcagtgagccaagattgcagcactgcactccagcccgggcaacagagaccctgtaaaaaaaaaaaataaataataataataataggcactccctagtaggattgttgttagaattaaattcttaacattgtgcctggctcctagtaagtgcttaaatactaactactatttttggtatttgtaaccaaaagaaaatttatttaaactgagagtcagtatgttgcctttgcaaatttatagctatagtggattctgcagtttccctgatcgctcagaataatcaagggtaaacctcataattaaaagaggatgcactgtagtcaggtgaggctggttagtacattcattgcttctgcctgtttaactggacaacattgggcaagttgcaaaattctacagggcctcagatttcccattagtgaactagaactgtaatctgccctctgataagtttaaactgaacataggtatgtcatgcagtgagccagatactctagggatcatttagatgagtgagacatggttttggaattcatggagcttattggccagtacagaatgtaagactcagagaactaatacagaattaaagttatgaaacattttgttaagagagaagcaaatagcttccttgttttatttctctctcatttatgcatttatttatattgggggaagtgcttatgtctctaactttgtttgttttgagacagagtttcgccttgtcaccctagctggattgcagtggcactgtcgcagctcgctgcaacctctgcctcctgggttcaagcaattctcctgcctcagcctcccgagtagctgagattacaggaagccgccaccatgcctggctaatttttgtattttttttagtagagatggggtttcaccatgttggtcaggccggtctcgaactcctaacctcaagtgatccacccacctcggcctcccaaagtgttgggattataggcgtgagccactgcacctggccccatgtctctaactttggatttttaaattgagataatgtggatgcgcctcacacagtatccaccatgtagtaggtggttattagcgttaatttccttcccctggtgtcccatttcttaactatgggtttgtgtatgtattttagctttcatgttcactagcaattttgctattgtacacacgaattacatggaatttctaccctaaaaattctgatagataaaactatatatgaaaaacctaggccaggcgttgtggctcacgcctataatcccagcactttgggaggccgaggcaggcggatcacctgaggtcgggagttcaagaccagcctgaccaaaatggagaaaccctgtctctactaaaaatacaaaattagctgggtgtggtggcatgtgcctgtaatctcagcgacttgggaggctgaggcaggagaaacgcttgagcccaggaggcagaggttgcggtgagccgagatcatgccattgcactccagcctgggcaacaagtgtgaaactctggctcaaaaaaaaaagaatgaaaaacctaacaaaaatttactctcctgagagttttggaggaaaaatctgttagaactgtggaacagaataggcttgtggccaaaagggaaccaaccattcattaactatttgatccttgaagacttttaaatgggttcctcactaaaagctgttttttaaaaaagagtatcggctgggcgtggtggctcatgcctgtaatcccagcactttggggggccgaggcaggcggatcacaaggtcaggagttccaaaccagcctggccaatatggtgaaacgccgtctttactaaaagtacaaaaattagctgggtgtggtggcgagtgccagtagtcccagctactcgggaggctgaggcaggagaattgcttgaacccgggaggcagtggttgcagtggaccgagactgcgccattgcactccagcctgggcgacagagcgaggctgtgtctcaaaaaaaaaatgaataaaataaataaaaataaaaaagagtatcatggccacatgagattagtctaagagaaatgcttggtcataaatgggtcttagagatggaaagaagtgtgtaatgtagcagtgccctggtggtgctggcctggaatttaacattcacagagataattacataaaaccaaataatgctgtagtgttttttagtacccttaaagaccttgtgtcggccgggtgcagtggctcatgcctgtaatcccagcactttgggaggctgaggtgggcggatcaccaggggtcaggagtttgagagcagcctggccaacatggtgaaaccccatctctactaaaaatacaaaaattagccaggcatgatggcgtgggcctgtaatcccagctactcaggaggctgaggctgcagaatcgcttgaacctgggaggcggaggttgcagtgaatggagatcgtgctattgcactccagcctgagtgaaaaaagcaaaattctgtctcaaaaaaaaaaaaaaaaagaccttgtatcaccttcctgtgaacttggtcctttgtaaataatctccaggagtgacagatttgtaggtaatgctcagctctggaaagtggtgcaatgctaagataaaggggtacgctgcagaaaaatctccaggtcccatgagtggtcataaaagaggcagctgactttgttttaaacaaatgtataagagataaagcccagaactaatttttctgtccattgcaaaccaaaagggacctctagtagtaatgtaatctgtttcctgatggttatcaaccctttgccattagtaataaaaaatgccggccgagtgcggtggctcatgcctgtaataccagcactttgggatgccaaggcaggcggatcacttaaggccaggagttcgagaccagcctggccaacatggtgaaatccagtctctactgaaaatacaaaaatacagaatggcttgaacctgggaggcggaggttacagtaagccgagatcgtgccactgtactccagcctgggcgacagagtgagactccatctcaaaaaaaaagaaaaacaaaagccaagtttgtacaagtgttaggtattctcaagcagagattaaaaagaaatcagaaagtatttttttggccaggcatggtggttcacgcctctaatcccaggactttgggaggccgagacgggtgggtcacctgaggtcaggagttcgagaccagcctaatgaaaccctgtctctggccgggcttggtggctcacgcccatagtcccagcctactttgggaggccaaggtgggtagatcacgaagtcaggagttcgagaccagcctggccaacatggtgaaaccccatctctacaaaaaacacaaaaattagctgggcatggtggtgcgcgcctgtagtcactgctgcttgggaggctgaggcaggaaaatcgcttgagcccaggaggcagaagttgcagtgagccgagatcctgccactgcactccaacctgggcaacagagcaagactccatctcaaaaaaaaaaggtatttttttcactcatattggtttcataccaagaatacttggtgtaagtctaattgatgcatgttaagaaagagtgaacattaatgggaattgcaaagagagaaggaaactgaaaacgagttaggttgatagactaaaatatgagaagtttataaaatcatgaatggattagacaagaggaacatggatttactatttaaattctggattatagccctttaaaaatccctgaagagggcaacatggcaaggctctgtctctacaaaaaattttaaaagttaaccaggcatggtgttggacatgtgttatcccacttacttgggaggctgaggcaggaggattgcttgaacctgggaggtcgaggctgcagtgagtcgtgtttgcaccactgcactccagcctgggcgacagagcaagacctgtctgggaaaaaaaaaaaaaaaaaagttccctagagcagtaagtttaagaaatgaaggactgctttacacagaggggtataaaacccagagaattcatcattttgagagatgtatcaaaaagaaaatggaatagattcctcccaaaaaggaaaaataacttgaatggtatgttcgtcatctttggggttgatctgaatgaggttggcagaattgttgttagaagtagaatgctagatggagaggccacagagcagggacagggagagatgacagtggcctgttccacaggcatctcacacacagtttaagttttagcatcctggactctcctaatactgcctcccttctcactaaggattttaactgtgccttgtcagagccagagcagggtaaggagggcattcccacagacaggagattcatatgaggtgcaacacatttattgtattgtatttttttgtccataggttattggggaacaggtggtgtttggttacatgagtcagttctttagtggtgatttgtgagattttggtgcacccatcacccgagcagtatacactataccctatttgtagtcttttatccctcaccccttcccactcttccacacaagtccccaaagtccattgtatcattcttttgcctttgcgtcctcatagcttagctcccacatatcagtgaggacatataatgtttgattttccatttctacttacttcgcttagaataatagtctccactctcatcaaggtcgctgtgaatgccattaattcattcctttttatggctgagaagtattccatcatatatatatatcacagtttctttatccacacgttgattgatgggcttaaaactggatccttggctgggcacggtggctcacgcctgtaatctcagcactttacgcctgtaatcccagcactttgggaggccgagacgggaggatcacaaggtcagaagatcgagaccatcctggctaacacggtgaaaccccatctctgctaaaaatacgaaaaaattagccaggcgtggtggcgggcgcttgcactcccagctactcaggaggctgaggcaggagaatagcgtgaacctgggaggcggagcttgtggtgagctgagatggcgccattgcactccattcagcctgggcaacagagcgagactctctcaaaaaaaaaaaaaacaaaaaaaaaaaactggatccctttgctattatataaaagataattggcaaaacttgaatagggcctgaataataatatgttatagaaataatgtgtcagttacatttcctgattttgagagccaagttgtggttatatagaagattgtcctattagtccgtgatcacctcagaatacttgaggccatgtgtcttacagttagcacttcactctcaactgagttaaagaaaaaaattaagtgtcctatacttccaacttttctgtaactttgtgattatttctaagttagcattttatcagacacctcaaagaagagacagattaattcagagtaggactagtgttgggcttgtgtaatttcttttaaaagggctgccccatgtatatgccatgggaaatgaaaagattagaattccagtgtaatgtgattctttcctatagagtcatcctggggagagttggggtatatttgacttcagagttgtgtgtgcgtgtgtgcgtgtgtgtgtgtgtatttctgtttttctcaccacccttctttttctatatgacctctgcaggtaatccacgacttcttattctccttgaaggaaagcccagaaaagtttcagattgaagccaattttcccaggcgagtgctgccctgcatcccttcagaggagtggcccaatccccctacgctacaggaggccggactcagccacacagaagttctttttgttcaggacctaactgacgaatgacatttttttcttcctgtcccctcctaccccagtccctaaaagaaatggggaaaaaagaaaacaacagcaagtcagaaaaaaaaaacaagagagagaaattcatattattattattattataatacaatattttttttaaaagactgctgcatccttaggaaggatcagaaaccatgctgcccgtaagagtcacaacctgtgtgtgcgcgcaaggttagcaacaaacgtacccgcttggcaagcccacccttcctgtggcctctgtgcacgcaccttccagtgaacagagactcttcaccttcgacccatccattgtcccagctgggaaggggacattcccactagttctcattcattcttgcttttatgaaaaataaaagtgaaaaacctccatcaaccagctacttgcagcatctcctgaggacttgcttctcctgcctctggggaagagagggaagagaaagcacagagcagagaagcagagatgttccttgaactgcccacaagttttcaataacttttatttctgttttgtaatgaccaaaggaatgaggctgacataggtatatatatatatttttttcctttatttgataaagagccaattctttaaacccatgagtttatgccctgggctccttagcccacaatagtgtaataaaagtgccccgggctggtttgtgcttatttctgccattgtccctctcacgttcccagagaggtcattctttttggtccaactcttgctgtcctttcttaccacctgtgcaccccacttggagcagtgggaggaaatctgggtttgtggccccacaaaggctgtatatgtaaagatacacctatgtatgtggtggaactcacctttacacacaactgcagcttttccttggagtctgtaccaggtggtggttatggggtctgaaccaaaggatagcagctcttcattcctcttctgacatgtgcatgctgctccccccagccctgggctttcctgaattgccaagcctggtgcctttccaaaggactagcagggcctgtggtggagccagcagaaccacaggagagtgccctgcctgtctcagtggaagtgtattattgttttaaggatagaaccagaggccttgaagggagccaagacagaactcccagcctgtgtaatctattggaaggcacattttcatttctgatgcagccaccttctggaggcagcttttatcctttctctctattgctatgttgaagtaatagggttttttttaacctctggatgtctcgtctgtggttgagtttatggtaatgggtacatgggtcaggccatgtattaacagatgccagtgcgctctgacaagtattccaaagtgttctgtagctagactggtgcaggctcgttgtaccactgcaaccgactgacgttactgtagttcctagaatgctgtgagggcggggggttcagatcaacataaagcctaacttgctggagttgtagtctcaaggctttctctcttgcttaactaaaacctaaggaccactgtttttggtagcaattatatggttactatccactgcagtcctcagttgttggggtaaatcccacatggcagagtaaggcaccccacagaaattaacttggagagcctgagaaattcccagtggccttggcatagctgtctagaacaccatctctaggaaaatttaattctgtccctggccagctattgttcttccacttcgttttctgctgtcccaaggccagatgagtggaatcaccatctgactgctgtcaataaaatgtatctggcgtgaacagcaggataacccatgttctccacataaggataaccttacgtgaaaccttcctgctgacaaccatgcagaggaatttttccacttaagtcagagccttcctccccatctggaattcacagctgttccctggcagcacacaggagggtattaaggacctttgtgaggctaggtacactgtccacacctctttggggaagttacgattttttttttccatcataattcagtctcttcttattctacagtgtgcactttatgcctctcgccttttgataatagttgttcagtgaaggaagtcagctgccagaatattaagaagggtctccctttatgtcagtacaactgttagggcggccttcccatttactttaggtttcaagaggattcaccggaagcacatgccccggtctagtcccatttgaaacagttctgctttactgagaccctaggccggtctccttgctgaccctagcgctgctgcctaggtgccatttcctttcctcctcagtcaaatacaggctgcacattttgtcacttaatgccagtacaatctgtgttactcctaaggacttttgggattttgatgagacctgcgagggagaagacactgagaagccagtgatctgcaagcatttgctcttgtttccacatcacctctgggatatttcagctgttgtttccaaatggcaaatcatcaactaaaagcacttgtttcaagttttgttctgcactcccacgactgaagttgtagattgagctgaataaccatgggaagtgaccaagcaaagacactcgattggagtcagttgaatatttgtaccctcagtggagcccttctggtcttttcttccacttctgcagaatttcctctagcaaatacttctttctccttgcttgcctccaccatgatatttgaataagagatggccagaggataacacttgtctcttaaaaactaagctaaaaagaacctagaaccttcaattgagcagttgtgaaaattgctaatggtgccaaggccaagcaaagagtttcagaaaatgactgagaaggagcgataacccccagaatgcaaaatcaggggcatcattatccggtgcttgaacaaggagctccgctctacaactggtttttttaggacttgtgaggaacacagcaacggaaatccatccacaaaggatgcagtgccccaacttgtactgcgcctgaatagtcatgtgataatttactgaagaaatctagtgtactttaaatttttttcataaaagtttacattgtattgtaggttaacattaaatgttttatagcaaaaacttcataacaggctgtggatctttctgtgtgggaccgatgtggtagataattttctatgtgtgaaggagaggttgaaaaacaccgggagggaacagcatggcatggcattgccaagaaggaagggagagtcaaagagaaggatggagttaggtcttctctgttgtatccctgtggaaaaatagcaacttagtatgatggagagagagagcagacaggcctgggttcaaatttgggctctctagtttgtcaggtttgcaacctcgggcaaattctctagcttccctgaacttgaatttccccagctataaatgaagataatgccgtccacctcaggataggtttatagattcaatcaagtaaatgtatatgaggctcctgatatgtagatgtcattaagtgtttgttccccttctatgggagtgtattttgtaagaatattttcttggaataacattttctt

SEQ ID NO: 722 - DNA, 444 bp, Homo sapiens
gaaatatgggagggcacaccctgtcttctaccagggaacgtacagccaggtcagtgccataaaccatatagatgccaacttaccgaaatgattctatcctcaaaggagagcacagcccagcactgatcatgtccttcttgtactcaaaaaccttaattagctcttcactgcttataggggtgggtaataaaaaagaccaaaccttttagctggcccctctttgatctaatgctgcccttcttttgaggtcttttctgcataacttattttaccataccctcagttccagctgactcattccctgaacatagtctgtacttgcctacctctgtgcctttgcttttgccggtccatccacgtggaatgccttcctcacatttttgctaattggaatcttgccagtccttcaactagattatgtcacgccccacttacagctatccc

SEQ ID NO: 723 - DNA, 132 bp, Homo sapiens
accgcgcccggctaattttttgtatttttggtagaggcgcggtttcaccgtgttagccaggatggtcttgatctcctgacctcgtgatccgcctgcctcggcctcccaaagtgctgggattacaggtgtgag

SEQ ID NO: 724 - DNA, 454 bp, Homo sapiens
tcaaaaaaaaaaaaaaaaaagacggaaggagaaaagtatgagacataatacctgtatctatattgcctaactagaagggcaccagtggggtgggaagttagaccaggatctttctcctcttccagtctcagcccaggccctccctccaatcctggcctgggattctgagccgtaacatcctccctgcagctcaggggaggggaagacctccacatgggaactggaaaactgcctttccctgctggtgcacttgccccacaccacctggtccttctgaagggtctggagggcccactgtccacccctgcccccggcagtcacatggaaccctctcaggctattttcccataggtttgctgagccaaacttctccctcagctctgcacccctcctgggccatgttcccacatggagtccctggtcacagtcacctgcttgcttcttaaggatgtgt

SEQ ID NO: 725 - DNA, 454 bp, Homo sapiens
cttgagacaaggtcttcttctgtcgcccaggctggagcacagtggcgcgatctcagctcactgcaacctccgcatccaggttcaagcaattctcctgactcagcctcctgagtagctgggacgacaagtgtgtgccaccacgcccagctaatttttatttttcatagagatggggtttgaccacgtgggcctgacctcaggtctcccaaagtgctgggaatacaggtgtgagccactgtgtccagcctaggccaaactttttgatttgtaacatacaagcaggatcctggagatctagccggagaggaaagcctttttggtggccatgggcttcctctggttgcttagcactgggagggcaagtgggagcatcgagagtagacgagggcagggaagtgggggtgctgagggcaggaccctgagtcttgagtggacacgctcgcctctccacact

SEQ ID NO: 726 - DNA, 107 bp, Homo sapiens
ctgaagtcacactatgtgtggcacatgcaacccagagccctccaagagcccagggccctcactgggacacgctgccagccaccaagacctcaagatcctgaggctca

SEQ ID NO: 727 - DNA, 199 bp, Homo sapiens
ctctgatggacaggaggtgcctggctgtgacaagtacccactggggataaggggtaagggctcccccaggctggaagggaaacttgaggggtcactctggtgagcccctgtctccatgcaggctggactgctggaatggaaagtggtctagggagaccgtcaccatccttggggagaccctcaccccctgcccgtctgt

SEQ ID NO: 728 - DNA, 199 bp, Homo sapiens; identical to SEQ ID NO: 727

SEQ ID NO: 729 - DNA, 625 bp, Homo sapiens
ctctgatggacaggaggtgcctggctgtgacaagtacccactggggataaggggtaagggctcccccaggctggaagggaaacttgaggggtcactctggtgagcccctgtctccatgcaggctggactgctggaatggaaagtggtctagggagaccgtcaccatccttggggagaccctcaccccctgcccgtctgtgtacaggcagagtgctgccagcccagggacatccgccctccatggcccgagaagcccggaggaggagaggaaacaggacgcgtatcaggaacgccttttccttttctttgtaactaacccctcacttggggctggggagagctgagcctgcggggctggccctggcctggctgctgctgcctgcagcccccagctcaggctccctccacctcacagtccactgctttggcgctgcttctgggctggcctcttcactccactgaatctttgggctctcatctgtaaaatggggtaagactttctatctgactcaccaggaagtttgcttttcctctctttctgggatttacatgatttcttcctctctccatgagatgtgcattgagtgcttcctgcgcaccagcctctggcataggtggggatgga

SEQ ID NO: 730 - DNA, 625 bp, Homo sapiens
ctctgatggacaggaggtgcctggctgtgacaagtacccactggggataaggggtaagggctcccccaggctggaagggaaacttgaggggtcactctggtgagcccctgtctccatgcaggctggactgctggaatggaaagtggtctagggagaccgtcaccatccttggggagaccctcaccccctgcccgtctgtgtacaggcagagtgctgccagcccagggacatccgccctccatggcccgagaagcccggaggaggagaggaaacaggacgcgtatcaggaacgccttttccttttctttgtaactaacccctcacttggggctggggagagctgagcctgcggggctggccctggcctggctgctgctgcctgcagcccccagctcaggctccctccacctcacagtccacggctttggcgctgcttctgggctggcctcttcactccactgaatctttgggctctcatctgtaaaatggggtaagactttctatctgactcaccaggaagtttgcttttcctctctttctgggatttacatgatttcttcctctctccatgagatgtgcattgagtgcttcctgcgcaccagcctctggcataggtggggatgga

SEQ ID NO: 731 - DNA, 625 bp, Homo sapiens; identical to SEQ ID NO: 729

SEQ ID NO: 732 - DNA, 412 bp, Homo sapiens
gcactttgatgctggctgcgcccatttgtgggcctctggcctccccaggccaccttctgagagcacagggagctgtgtgggccagaaaaggagcaggggctttggggccgccaggcgggcgttgcctcccctgaactgggtaacttttctcttcccctccctagcctccagtttccaattctgtaaaatgaggatactggctttttctccttgagttatccttgagattaaacataaatatttaaagtacctagcacatgacaaattaacaaatggtatgtcttaaaataatcactgggcatgatggcatgtacctgtaattgcagctactcaggacgccgaggtgggaggctcacttgcgcccaggagatcaagaccagctagggcaatatagtgagaccctttctccaga

SEQ ID NO: 733 - DNA, 412 bp, Homo sapiens; identical to SEQ ID NO: 732

SEQ ID NO: 734 - DNA, 180 bp, Homo sapiens
tcgtctgcctaggctggaaactgggaaggattcatcaagcttgtgaatttatcttctctacttagggttacacccaacagtgtgctggtaacaactggccctccagaaaaaaagaagggtgggggattttagcatctgccaatttctgtgatgtaaatactctgacttcagatttcactc

SEQ ID NO: 735 - DNA, 412 bp, Homo sapiens; identical to SEQ ID NO: 732

SEQ ID NO: 736 - DNA, 180 bp, Homo sapiens; identical to SEQ ID NO: 734

SEQ ID NO: 737 - DNA, 214 bp, Homo sapiens
agggagggtgacagaggcaggcccaggctgaagattcaggccatctggccaggctgggagcaggcctttggttgggccaggggctgtctcccacccactcctctgcctctgcccccccgcagaatgtctctccgcagcaactcctctttggaagccccaccttcagggacctaacatcttggcgttcttctcactgccaccagcccctgcatgt

SEQ ID NO: 738 - DNA, 214 bp, Homo sapiens; identical to SEQ ID NO: 737

SEQ ID NO: 739 - DNA, 652 bp, Homo sapiens
atagggacagcatgagaaactagatcacggatggggtgggagagggggctgcatggccaggaaactgctggctggaggggtgtggaagtttgcatcctgcctaaggagacagtaagggcagttatcttcctggacaaataaggacataaaaccataacagtagcttctttttaacaatgtgtaaggcaatatgctgagcatgttatatgaaatatctgacttcatgctcaacatcccagcaaatggatgtctgtaatattagaacagtggccagcacaaagtatgcacaatgtaattgttagtgattatcctttatcatcctcagcctcaccattcccatttatcatttgaggaaattgaggctcagacttgttcaagatttcccagcacctaaataacaaaggaggaactggaagttgggtctgtcagtttcagagaaactggaagccaagtctgttcaattccaaagttttcaccttttaaaaaaccctattctgaccaactccacataccccagtatgtgagtcctctttcaaaaggcacccagaaaggctcctgtgatagtggtgttaagagacacatcttctcccacatttccaccttatctcacttccttgagaaccttaccttgagtatcttggttccaaaccag

SEQ ID NO: 740 - DNA, 652 bp, Homo sapiens; identical to SEQ ID NO: 739

SEQ ID NO: 741 - DNA, 551 bp, Homo sapiens
ggaaggtttgtgtttttaagtgggtcagaaattggaactttaaaatgttggtttcagcaattttggtttatctgttctttactttcatctacaaataatttgaaacttttatctctctgttgtttgttcatcatcccatcaatccgtcggtccattgtgtagcatccactgcaacacacctttctcttagatttaattttttgttcactggagatttgagggctcatcaccaaatccagaggtccaggtttcccagtacactcacgatttctgggaagaaactgtttttaggattgccattaatgtttccaggcccttcccatttttgtgttggattaaaatggtgacaacatgaagcctgcagtcaatgtgaagggagttgggtgcctttcttagtgagataccttaaagggaacctttgaatatggctctctaaatagtgacagatctcttataaaatatgttcgcatatatagagttcaaaggtaagctagagacatgaagaaaggagcagtgatttatatttatcacttccttaaaatgattactaa

SEQ ID NO: 742 - DNA, 551 bp, Homo sapiens; identical to SEQ ID NO: 741

SEQ ID NO: 743 - DNA, 229 bp, Homo sapiens
tttttttattattatactttaagttctagggtacatgtgcacaacgtgcaggtttgttacatatgtatacatgtgccatgttggtgtgctgcacccattaacttgtcatttacattaggtatgtctcctaatggtatccctccccctccccccaccccacgactggccctggtgtgtgatgttccctttcctgtgtccaagtgttctcattgttcatttcccacctgtg

SEQ ID NO: 744 - DNA, 484 bp, Homo sapiens
atcacatcaacattgtcagattcttttttttttttttttacgacaaagggactttaaaaaaaatctaagaatttaactttatcacatacagtggtagatgttttaccctcgttaattcttgaagaaacttattttttgattgcctttactccatgcgtttcagaagtttctgttgtaggcatttgaatagaaatggcatttagataaatttaaatgtaggcctaccaacaaccattgagtggcactatctttataacaacttaaaaagctgtacttagtgaaactaatattaatcactgtcaagttttgacaagtcttgtaaaaagggagaaaaaataattaggttaaaggtgttattgctacgatttctgcttaggatgaaaagtaaaattgtggctctctggaatttacttggaagcagatcttctggatagcgagatttccatataatggagtttactacagtttactacttgtggcctga

SEQ ID NO: 745 - DNA, 229 bp, Homo sapiens; identical to SEQ ID NO: 743

SEQ ID NO: 746 - DNA, 485 bp, Homo sapiens
atcacatcaacattgtcagattcttttttttttttttttacgacaaagggactttaaaaaaaatctaagaatttaactttatcacatacagtggtagatgttttaccctcgttaattcttgaagaaacttattttttgattgcctttactccatgcgtttcagaagtttctgttgtaggcatttgaatagaaatggcatttagataaatttaaatgtaggcctaccaacaaccattgagtggcactatctttataacaacttaaaaagctgtacttagtgaaactaatattaatcactgtcaagttttgacaagtcttgtaaaaagggagaaaaaataattaggttaaaggtgttattgctacgatttctgcttaggatgaaaagtaaaattgtggctctctggaatttacttggaagcagatcttctggatagctgagatttccatataatggagtttactacagtttactacttgtggcctga

SEQ ID NO: 747 - DNA, 137 bp, Homo sapiens
ttacagtgacaggggctgaattaaattcccaggttgggaccaccactttttagtctgacccctgcagccggagtctcccagagcccttgggaactcggcagcggagagaaggctgagggattccgcgggcagggagg

SEQ ID NO: 748 - DNA, 262 bp, Homo sapiens
aaaaaatacagcattgctaaaccttgtcttctcattcagtactagtgtaattgtgttttagaatgccagttgtgtctgcacattcccagccctctcaagttcatatccatcaaagctgtcagtatgtcatctgtagcttcatctatgtcatttacaaaagtgttgaattggtaattattttaagtttaagttaaaataatcttaaagtttaagatttctttagtcctggatattatagaaaaaaggttttgaaataaacatc

SEQ ID NO: 749 - DNA, 262 bp, Homo sapiens; identical to SEQ ID NO: 748

SEQ ID NO: 750 - DNA, 262 bp, Homo sapiens; identical to SEQ ID NO: 748

SEQ ID NO: 751 - DNA, 1135 bp, Homo sapiens
tgtggcattgagagaagctttgagtaagtgtttttttctctcctaaaagaaaatttttgagtcagtctttacaattacataattttatagatctggtcatgttgtataatagtgaaaaattaagttttgaatctagccctatttgtttaaagttaaatatttatgaaaaatctagatctgtttgaattaaaatgtaagtagaattggttttagggatggggtcggattttgttttttagtgactacaaaagtcaagcatgttaagtggtaatagccatctggttattttcctgcatttgcgttgagtgtttcaaatggttcattgtttgtgttaataaatactgccctgtgcccttactgttggagaatttttgcacagggtgtcagttcttactaagctgtttggtagtaagcatatatcagcagtctttagactgtcttttgatttagatttacagtaagtggtgtactgttttgttaaaaggaattatgtattatatgcatgtaattaagttattgaacagaagtttgtgataatctgctaccatgaccgtcattttactagaaatttgctttaaaaatggcatcttctaagaagctgttaaattcttcattttaatttgttaattggtatttttaagcctcctcccctattcttttcagaattggtaatttcgctgatgataaaaatcgtgtttatttgacagcttcttagatcgggtaggaatttctattttttcataaaaatgaaagaaaaggaaagaaagaaacaacacacagtctcggattgccttttttcatgctgcaactttggcactgaagtggacagacagaacagcttcccataatgccagattgcaaaaactgaaatgttttccaggtaccactttcaaaactcagaagcagctgaaagaaaatctgaacaaacaaccgaataagcagtggaagaaatcacaaagtaaggaacaaaatctcaactaatataaaattacctcctctttttggagcagaagaaaatgtagaccatttgacatcgtacctggcataaaccatgggcaagcctgttttccaggtctgggaggctcccagtgacctatgctaaacaagccatcatggagatacttctaaaaaaaaa

SEQ ID NO: 752 - DNA, 5409 bp, Homo sapiens
tgtggcattgagagaagctttgagtaagtgtctttttctctcctaaaagaaaatttttgagtcagtctttacaattacataattttatagatctggtcatgttgtataatagtgaaaaattaagttttgaatctagccctatttgtttaaagttaaatatttatgaaaaatctagatctgtttgaattaaaatgtaagtagaattggttttagggatggggtcggattttgttttttagtgactacaaaagtcaagcatgttaagtggtaatagccatctggttattttcctgcatttgcgttgagtgtttcaaatggttcattgtttgtgttaataaatactgccctgtgcccttactgttggagaatttttgcacagggtgtcagttcttactaagctgtttggtagtaagcatatatcagcagtctttagactgtcttttgatttagatttacagtaagtggtgtactgttttgttaaaaggaattatgtattatatgcatgtaattaagttattgaacagaagtttgtgataatctgctaccatgaccgtcattttactagaaatttgctttaaaaatggcatcttctaagaagctgttaaattcttcattttaatttgttaattggtatttttaagcctcctcccctattcttttcagaattggtaatttcgctgatgataaaaatcgtgtttatttgacagcttcttagatcgggtaggaatttctattttttcataaaaatgaaagaaaaggaaagaaagaaacaacacacagtctcggattgccttttttcatgctgcaactttggcactgaagtggacagacagaacagcttcccataatgccagattgcaaaaactgaaatgttttccaggtaccactttcaaaactcagaagcagctgaaagaaaatctgaacaaacaaccgaataagcagtggaagaaatcacaaagtaaggaacaaaatctcaactaatataaaattacctcctctttttggagcagaagaaaatgtagaccatttgacatcgtacctggcataaaccatgggcaagcctgttttccaggtctgggaggctcccagtgacctatgctaaacaagccatcatggagatacttctaaaaaaaaaaaaaaaagcaaacaaaaactacactttaaaacaaaggaaatgcagaaaagggtttaattgagtgaagattcaagagtagttgggggattgcaagaagaaaaaaatacttgatagtgtccaggataattttcaggttcaaggatatatgatgttagaggcagctggcattaaacaacagatctgaagaggagactaggcattaagaagcatttctgtgggaaccatgaaatctccagatttgggggatatactctaccaaattagacatggacctcagatcctggccagaagctcattctgtaatgggagctcctgttatatttatcgtatttacccagcatgagatcaagggaatggaatactgcatgtgataggctgctgtgggcaaactgaggaatattgagagagacttgaaggtgtggagggaacaaagtaaaagacagtgagaattgggaggtgaaacgagatacttgggatggttttgctccagcgagcatatgatatccatcatgattaagggagtcctcagacatcttcttggtcataagttgcatgcttaggaacaacaggagtcgtcatttcagccaaagttccaccacagtattaatatacctagaagtttccttgcctatttttgctatgaattgagtcagcagaaaaagaaattcaaaggataaatttataggaatagagttatttgtcaccaattttcttcagccagtgctcaggattaattggatgtcctgttcctgaacactcttaatttgaggtatttagatcctgttacacccagactaggaaaaaaaggtacttgatgtatctcggtgtctccaaatcaataattctaggactttatgacctgaagggtctgttggaggtaagtaggttaggtctgtctaaatagcgtatttttacattgaccacatttaggaatgtttaaatttcctagtccattatttattttaggaattatgacttaaatgtgcatgtttgccatatgttcagagtatatctttaactatagagctaaaatttttcctgttagtcaactttttgtgtctgtattcttaatgaccttttgtttaattccaacagcatctacaaatccaaaagctgctctcaagtctaagatagttgctgaatttcgagtaagttacagaatttgtttaatatagcaaagtattattcaccccttttgtattatagtttcctgtatagtccaataagatttatctgtattcaattacacatgtcatgttttaaacatgcatgaactgttctaaaggaacccagattgggattagattgcttggcgttttatctgttcccctaatggtagaaataaccttcttccagtatatctattatcagctgagttgcatattcaatttatgccagcaagagagtttattttcctgtgaaactctttctaaattagaatttgcttagaataacagaaggctatgtttatgtaattaaaatttagagaggctatataaatggacctttgtctgttttagtcttaattctgtatccataaattagctttgtgtaatgaaggaaaaggatcttttaaagtctgtaactaggctgggcgcggtggctcacgcctgtaatcccagcactttgggaggccgaggtgggcggatcacgaggtcaggagatcgagaccatcctggctaatacggtgaaaccccgtctctactaaaaattaaaaaaaaaaaaaacaaaaattagctgggcgtggtggcgggcgcctgtagtcccagctactcaggaggctgaggcaggagaatggcatgaacccgggaggcggagcttgcagtgagccgagatcgtgccactgcactccaacctgggcgacagagcgagactccatttcaaaaaataaataaataaatgaagtctataactaaacatggttttgacatgataattgatcattaatatctgtcaccatgagaaaaagtgaaaagtttttttcctcccagggttttgttaagctttagggtgtttgttttgttttgttttgttttgttttacaaaatgaggagagagagaatgagaataattgaatgatcttgtaaatgaaatatgactctggtctgtgtttagtctcaggccctaattgaagagctgttgctatacaagcgctcagaagatcagatagaactgaaggaaaagcagttgtcaactatgagggtggatgtgtgcagcacagaaactctcaaatgcttaaaaggtaatgcttacatccttttagagtaagtcagattttctttccatatgtgtcatttttccagtaatcatactggtttacctcataaggagatccttgggtagaaagcagttgtggcacctctggtttcccaggtagttatttcatgcatataaatttcataagtaaattctgttgttctcatttctagtactttcttggtgtactaggttatatatagacagttgtatttcacatgtatggttaattggtatgggtatgctctttaatgaagtcactctaatgcctcataaaatctagttagaccatctagtttccttgcattgtaaattgtaaatcatactaataatttattataatgtaagcctcatgaaggcagaaattatattgatttgttcattgctataccctggcacctagaacaatgcttggcacataatagatatttgatgaatatttttgaaataataagtaaatgactactagctattaattttggcaccaattttattcctgtgccgtactttaaatttaacagaccagacacagtgcctgtaatctcagcactttgggaagccagggcaggaggactgcttgagaccaagagtttgagactagcctgggcaacatagtgagaccctgtctctacaaaaaaattaaaacattaatgagcttggtggcacacacctgtagtcctagctgcttgggaggctgaggcaagcagattgtttgaccccaggaggctgtagtgaactctcatcatgtcactgcactccagcctgggtgacagaagagaccgtctctaaagaaaaattttttaaaaacaaacaatttaacatatattacctaattcaatcctcataacagaaaacatactaaaaatctctattttatcacatgagagatctgaggtcttgtaaggagattagtagcttacccaagttacacaactgataagaggcaaagccaaactttatactcatatccaaagccatattctgccagtcactgggaaagaagtagatatactgaattatcacgaatctttttcagataggaaagaagaacttttattgtgatgcatacagaggtcactttatttttacttttctgaacgttacttttctcgtttaagagataacatcttactaccttctgtaatgcaaaagttatggtataagcgaatacagttgagcttcattctgttattcctaagtaagtagcagtgtggaatccaatttgtgaagaaaataattaatcaacaaactcttttagttgaactttcttttctttaccttaattacaagtgccttcactctggcaggttcacatgagtctgttctgtaaagaattttaataatctgttttgtgattttgtgatttggagaaacttgtttaagataaaattgtgaggccgggcacggtggctcacaactgtaatcccagcactttgggaggcccaggcaggcggatcacgaggtcaggagctcgagaccatcctggctaacacagtgaaaccccatctccgctaaaaatacaaaaaattagctgggcgtggtggcaggcgcctgtagtcccagccactcgggaggctgaggcaggagagtggcgtgaacccgggaagcggagcttgcagtcagctgagatcgcgccactgcactctagcctgggcgacagagtgagactccgtctcaaaaaaaaaaaaaaagaaagaaactaagagtattagagtactgcacagtaaggcagcaagagtatgttcacaaagagaggttttcttcaaaagtcaaaagactaaatttttttattttttattttatcctgaaatgaatatttcccatgtcattttagataaaacaggtgggaagaagttctccaaagaatttgaagaggcaagctccaagctggaagaatttgtgaatggattagataagcaggtgaaaaacggaccctcattaacagaagcactggaaaatgctggaattttctatgaagcacaatacaaagaagtaaaagtggtggctaatgtaagtaa

SEQ ID NO: 753 - DNA, 104 bp, Homo sapiens
tttttgtatttttagtagagacggggtttcaccatgttggccaggatggtctcgatctcttgaccttgtgatccgcctccctcggcctcccaaagtgctgcgat

SEQ ID NO: 754 - DNA, 313 bp, Homo sapiens
agctgcttttaaaattagaatccgcggtgggggaggaatcctccagaactaacttgggcatgtgttctgccaggcagcatcgcccactgccctggcaaagtttgggcagctctatatggtggtagaaaatctcggtggactgtgtcaccaatgatggttcagagcctcaaacaggagactgtttgctctaagaggagactcacagagaggacctcagtacttctttctcttgcttgtggaccctacatttgaggagcaggcaaagaattttggctggcagaatgtgatggatcacattattatgaaacatttt

SEQ ID NO: 755 - DNA, 313 bp, Homo sapiens; identical to SEQ ID NO: 754

SEQ ID NO: 756 - DNA, 567 bp, Homo sapiens
gccttcactccacgggggtgaaggatcaaggtgctcggtggcaatggtctgtggttcctgtgatggggagactgattctgggttgttggaaatgtgtttcctctgctgagtcaattccatccccttcggttcaaaaggcagctacagtctcttctttttagaacacagatttcatcatgtcattcccctgcttaggaacatggcaagttataggaattagcaatgataacctctcctggggagttttctaagatcttattgcctctccagagagcccccagagctcatctagaaccccaccttgtcatactagaggcttggtggctcctacccagttcagcttgccccctctcctcccacctggacaggttgtgagcactatgttctgataggatttgcattattcttgtgcttccaaatctagccatttgtatctcctggcatgactctaataggactagctttgcttttacttctaacatctaattgaccacaggctttaattccattgtcacacaagacatgtcaagacactttacatagttccccaaagccctgcccaacctt

SEQ ID NO: 757 - DNA, 357 bp, Homo sapiens
accacaagagtctcttccattcatgtgtttgacacacatttatcaaatcctactatattctaggcactcttctgggtggtgggcatacagaagtgaataaaacagatgaaacccttgcccccgtggagtttatctttctcatggtgggagttagataagtgaatcataaaaacatagtctgccaagtagtgataagtactatggagataaatcaagcaggggagggtgctggtgtacactgggtgttggagggttctctctcattctgtagagagcatgatgatgagggcctggagagttaggggtgacttgagagtcctgggccttttgccttaactgcgggatatgggattaaaa

SEQ ID NO: 758 - DNA, 567 bp, Homo sapiens
gccttcactccatgggggtgaaggatcaaggtgctcggtggcaatggtctgtggttcctgtgatggggagactgattctgggttgttggaaatgtgtttcctctgctgagtcaattccatccccttcggttcaaaaggcagctacagtctcttctttttagaacacagatttcatcatgtcattcccctgcttaggaacatggcaagttataggaattagcaatgataacctctcctggggagttttctaagatcttattgcctctccagagagcccccagagctcatctagaaccccaccttgtcatactagaggcttggtggctcctacccagttcagcttgccccctctcctcccacctggacaggttgtgagcactatgttctgataggatttgcattattcttgtgcttccaaatctagccatttgtatctcctggcatgactctaataggactagctttgcttttacttctaacatctaattgaccacaggctttaattccattgtcacacaagacatgtcaagacactttacatagttccccaaagccctgcccaacctt

SEQ ID NO: 759 - DNA, 358 bp, Homo sapiens
accacaagagtctcttccattcatgtgtttgacacacatttatcaaatcctactatattctaggcactcttctgggtggtgggcatacagaagtgaataaaacagatgaaaccccttgcccccgtggagtttatctttctcatggtgggagttagataagtgaatcataaaaacatagtctgccaagtagtgataagtactatggagataaatcaagcaggggagggtgctggtgtacactgggtgttggagggttctctctcattctgtagagagcatgatgatgagggcctggagagttaggggtgacttgagagtcctgggccttttgccttaactgcgggatatgggattaaaa

SEQ ID NO: 760 - DNA, 348 bp, Homo sapiens
ggtaagtgggctctccctagatcttttcagagctgcagtctgcctgaccgtgtatcttcctttcctcttccatagctcctatttccaactcccctgccttagtgtatccattgacactaaggtgttgtgactgataccaagataatatgctgcctcttctgcctctctctttgagagagagagagagagaccaatggatcaggttcatttagcacctgaaagggggtggtgtttggggacagagagacctttggagttccagcttaagggtatcagcctccctggctgatgtaagtcagaggcctcttatacccactttgatgaggaaggactgtagagttgatgcca

SEQ ID NO: 761 - DNA, 597 bp, Homo sapiens
ggtaagtgggctctccctagatcttttcagagctgcagtctgcctgaccgtgtagtcttcctttcctcttccatagctcctatttccaactcccctgccttagtgtatccattgacactaaggtgttgtgactgataccaagataatatgctgcctctctgcctctctctttgagagagagagagagagaccaatggatcaggttcatttgagcacctgaaagggggtggtgtttggggacagagagacctttggagttccagcttaagggtatcagcctccctggctgatgtaagtcagaggcctcttatacccactttgatgaggaaggactgtagagttgatgccaggcagaaacaggcacatatgtgtgtcttctgcctctccccagatcctgtacttcaccaatggccatctgtatccaactggttctaagtcaaagcgggtcagcctgcttcagaacccccccacagtgggggtggccacactgaaactgactgacgtccacccctcagatactggaacctacctctgccaagtcaacaacccaccagatttctacaccaatgggttggggctaatcaaccttactgtgct

SEQ ID NO: 762 - DNA, 671 bp, Homo sapiens
gacataacatccaaatgtaatatagaatcgaatactgggcttttaaaaagttggcgtgtttgtttcctgcaggggagaaaaagaaaacttaaaaagttggtgtgaagaacattttagggactactaaggaacttttgagtatggactaattgttggattttgttattattgttaattttctggttaatcatatgggaaagtgtttttgtttgggggagtggtttgaagtatttaaaagtaaaagggccaaattgattttagcctctctaaacaaaagaaaaatgtgtatattaaggtataaagatggagaaaccagagtgggtttggttagatgttaacagttgatgatctagtgaggaatatattgatattctgtgtactccttcaattttaacataggtttgacatttttcataattaaaaattaattccttttagacttactttaggtgaaatagtgtaactttggtccataaatttccaaatccagtagtaagatcaatgttatttattcatgttaaatcaagatatactgtatgttaactgtaacttagaatcctttcctggggattcaagtaaggaatgattgcaaattgtattatcctttttgaggctcctttgactaaattaaatagttactgactttgagatcatcattatacttcttatgt

SEQ ID NO: 763 - DNA, 843 bp, Homo sapiens
ttgtggggttcttgctgaaaatacagaatctaattttgaagaaatgggcttatatatccagaaggtgggttgttttgcgagacagttatccacactcttcaaaagattcaatattacaaagaatggagagaggcagcagaactgctttaggctggcaaagactgaagagacataacatccaaatgtaatatagaatcgaatactgggcttttaaaaagttggcgtgtttgtttcctgcaggggagaaaaagaaaacttaaaaagttggtgtgaagaacattttagggactactaaggaacttttgagtatggactaattgttggattttgttattattgttaattttctggttaatcatatgggaaagtgtttttgtttgggggaggtggttttgaagtatttaaaagtaaaagggccaaattgattttagcctctctaaacaaaagaaaaatgtgcatattaaggtataaagatggagaaacagagtgggtttggttagatgttaacagttgatgagtctaggtgaggaatatattgatattctgtgtactccttcaattttaacataggtttgacatttttcataattaaaaattaattccttttagacttactttaggtgaaatagtgtaactttggtccataaatttccaaatccagtagtaagatcaatgttatttattcatgttaaatcaagatataccgcatgttaactgtaacttagaatcctttcctggggattcaagtaaggaatgattgcaaattgtattatcctttttgaggctcctttgactaaattaaatagttaactgactttgagatcatcattatacttcttatgt

SEQ ID NO: 764 - DNA, 439 bp, Homo sapiens
tataggcatgcaccaccactcccggctagatttttcttttgtattttttgtggagacagggtttccccatattttccaggctggtctcaaacttgtgaccttgagtgatccgcccatcttggcctccaaaagtgttgggattacaggtgtgagccactgcacccagccaggtgttaattcttaaactgttttgtatgtattataggaaagggcaaatgaataaaatacttatgttgggaaatagtgtttttaccatggagacggaagatataaatatggaatgggaaaggtgagaaagaaccctgtggtgctgaatgtaaatagatggtatgtgtatggactcattttttaaaaactggttatttcctagctctgttcgtagaaaggacctagaaacaatggaaaccccgtagcaagggacacatgtagactcagctct

SEQ ID NO: 765 - DNA, 157 bp, Homo sapiens
accttgtggggttcttgctgaaaatacagaatctaattttgaagaaatgggcttatatatccagaaggtgggttgttttgcgagacagttatccacactcttcaaaagattcaatattacaaagaatggagagaggcagcagaactgctttaggctg

SEQ ID NO: 766 - DNA, 87 bp, Homo sapiens
caccatgttggtcaggctggtctcaaactcctgacctcttgatccgcccgcctcagcctcccaaagtgctgggattacaggcgtgag

SEQ ID NO: 767 - DNA, 356 bp, Homo sapiens
gaaatgtgcctcgtggctaatgtccaagttgctgagcatatactttgagaccagagcgggtgggtacaagtgtcttctacatagcaaaagatggaccagaagcttggaaaggtaatgctatgatagcatcagacaaaccttaaagaggtgtgggtgcaccgtgggcaagtgagcagcagcactgtgtttgggatacttggtggggggtgcaatttaggtattttcctgaaaccttatctgttgcctagtcacagcacacccagctcatttcaggcagggctggcatgctcaaggatttccgcgcagagctcatttgtagcgttgaggttgtccgtggagctgcagctttaatttgc

SEQ ID NO: 768 - DNA, 6000 bp, Homo sapiens
ctgagcgagacccgatggccctcttcttgctctggctctcagttcatgaatgcatatgactcctatctctgctgggcgcattcgcaggtgaccccgcacgctgggcctcagactctggagctacgtggggtcttggcatcgtgacccagcatcaaggactctcctagttctctgtaaaatgatcttgtctgtgcgtgtgtttctcaaacccctttccctttatcttgtcatttttattagtagtatttctactctggaatctgtaatgagcacatttctattgccatagaggaatttggctaatttttttttcttcctgatttccttagaaatcctaagtaatgcactgaagagaggagagatcattgcaaagcagggaggaggtaggaaccgcttagtttgatgttttgtttttttagaacaggctgttatcgctggggactgtagagcttagtggtgagacgtgcgggttctgacacagactgcccggggtgggagcagctctgcctttttctagctgtgtgacgtttggcaagtcactgaacctctctgtttctcatagcactcatttgtaaaatgggggtgtaatagtacctgcctcagggatgctgtggagagtgaatgcatgtgaaagagtgcttccgcacgtgctgtgcacaggccgaccatcttcattgttagagtacctctcttttgggggttttgttttccacattataaattcctaaaagtaaatatattttccttagacttgatgataagactgaaagcacaccacccaacatgtaataaatgcttgtaaaatagataaatgtactcattaggaaaatatgaagaaagtatggtctgaaaccccatcgcccagtgatgactgccggaaacattttgttctgaatctttcattcatacacagctttatggatactgagaacaaaatgtactttttgagcatttttggagacagtctcgctctgtctcccaggctggagtgacgcggtgcagtctctgctcactgcggcctcaacttcccaggcctaagcgattctcccactttagcctcccaagtagctgggactacaggcgtgtgccacctggtttggctaattttttgattttttttgtagagatggcattttgacatgttacccaggcttatctcaaattcctggcctcaagtgacctgcatacctccagagtgctgggatgacagatgtgagccaccacacctggcccaaatgtactttttcagcctgattttccctctgagtatcttggcatctcacctcctgacttctgtgttgggctggctctggagctccacgctggtaccatttcctcccatttcttttttttttttttttttgagagacggagtctcactctgtcgcccaggctagagtgcagtggcacgatctcggctcactgtgacctccgtctcctgggttcaagcgattctcctgcctcagcctcccaagtagctgggactacgggcgcacgccaccacacccagctaatttttgcaattttagtagagatggggtttcaccatgttggccaggctggtcgcgaactcctgaccttgttccgcccgccttggcctcccaaagtactgggattacaggcatgagccaccacacccagctgccccacctcatttctgatgcctttgggcaaagtgcccattctcgctaggttccttatactgtggggaagttctgagacgtctcccctctgaaagtcacacattcttagagtcgggcctgctttggccgctcactgtgtgctgtgcagctagagaagcaggcgcggtgtggccagttacagagccagttagagaaactgcccagtttcctcttgaattggtatctttgactaggctgcttgggtcggtcacaggctggctctgggctgatggccactctcagaggcaagcgacagggtttcggggaggagccccaaactcggcatgtggaaaggggtggccttgctgacggagccagaccctgctttccagagttgcaagcaccacgggtgggggcgtcccttcgttctgctgactgacccccagccgctaccagagcccactctgcagtgccatcaacatcttctttccaaagccagcaagtcatttggtttccctgacaatagggtccccaaaagtggccagctgtgtgcatttgtacacagaggatctctcggtgtgtgtttttttgacctctgcttgatggtgtggccgaaaatcctttctctgtgccctgggagcgctgaggaaatgcagccagagtggcccccagcagagcatcctagagggacaggctgggaggggaaggtgggagtgactccgacttgtctccacataactcctgttcattaccctgggtggccccccgagtcgggggtgtccatgcctccccctggagcatttctcagtgtctgctgatggagaaacctcagatgtctcaggaattgacgtccatggttcacaaagcttgtcacagacactagcacctcacagacacacatacaggggtgttctttagaagttgtgttatggaaatctcagctgtggcatagagcagagagaatgctgggaggcccccatgtgcccaccacacagctgtagctgttgtcaacatttgaggggtgtcttaatggtaaattatggtgggcctttacccctgatccatgcccatgagctgaagtggtctggcgtgttgtgcacacgcacactcaagttcttgacacccacctgtgttttgtgtccctgtttcaggtggaggtggaggaagcgtccctgggatcgagaggatgggtcctggcattgaccgcctcgggggtgccggcatggagcgcatgggcgcgggcctgggccacggcatggatcgcgtgggctccgagatcgagcgcatgggcctggtcatggaccgcatgggctccgtggagcgcatgggctccggcattgagcgcatgggcccgctgggcctcgaccacatggcctccagcattgagcgcatgggccagaccatggagcgcattggctctggcgtggagcgcatgggtgccggcatgggcttcggccttgagcgcatggccgctcccatcgaccgtgtgggccagaccattgagcgcatgggctctggcgtggagcgcatgggccctgccatcgagcgcatgggcctgagcatggagcgcatggtgcccgcaggtatgggagctggcctggagcgcatgggccccgtgatggatcgcatggccaccggcctggagcgcatgggcgccaacaatctggagcggatgggcctggagcgcatgggcgccaacagcctcgagcgcatgggcctggagcgcatgggtgccaacagcctcgagcgcatgggccccgccatgggcccggccctgggcgctggcattgagcgcatgggcctggccatgggtggcggtggcggtgccagctttgaccgtgccatcgagatggagcgtggcaacttcggaggaagcttcgcaggttcctttggtggagctggaggccatgctcctggggtggccaggaaggcctgccagatatttgtgagaaatgtaagtggctcttggggaacttcttggtggtggtgagcatgaggggacaggggaggcaaagatcagcaggatgaagtcagaggtggcgcccttcaaaggggaccacacctccttgccactgtcccaaacgttttatgctagtgggacaagtaaggaatgtgagaactgtgggttctggaagagcctgggcttctccactgtgctagaatatggagcagacgctgagctcagagactccagtttctggttggcttgaagaggcactatgtgttgcacgatggtccagggaaagaagtggctgtaacggaattattttccccagctcagccacccttagccactatttagtgactgtgggctgcgcaccgcaggcctgagtgtcccatcctgcacggtgctcccacaggcagagccccagggagggagctggctgtgccgcttcacagccttgtcccacatgtatctattagtttcctgctgatcgcctcagtctgaagggcagccagcttctcggtatagtgagaaatctagcatggccctcagagccagctgcaaggcgtgccttaggatttggtttaatcacgcatcagtctcccttttcttctccccttcagctgccattcgatttcacatggaagatgctaaaggacaaattcaacgagtgcggtaagtgttgggaacggctttgtaggtgcttccctcgtgcttgttggtgacgcagccgagtcagcagcaaaacctccctcccagccccctccgtcggctcaggacccatggccttgccatgttctgcccacgccaatgctcaggcaggttgttgagtgtcctgtgatgtgtcacatgtttttcagctgtgttctcatttcatccttatttccttttttctttttgagtctttgaaacaaggtagtagtgtccccatttcacagatgagtcaggcagagtcttccttctgaggttacctggcttctaggtggcaaggctaaataaatacatcccagacgaggtcgctttcccctcagcacagctggtgtggggcctcggagagaacacagcccagcaggtgccatggggaggcggtgcaggctctgggcacacagcagctcctgtgagggtgaggctaaggtcttgtggtttcctggcacatcgggcaactcttctggagggctctgtctgtggctgaaagcaagttgtcttccttccctgccctccagggtgagcccccaccccgcatgcaccacctctgttctttttagctagaggggcctgagctagaggtctgggcagctgcttccgcactgtcctcccgcttcctgtttcagcagtggctccgatttcaccaccattgctgcttctccatggttcttggggcaagccgttgagtcatgatctgcctctttgctccattcttcacctctttccccactcctgagttcccatgttgtagctagatattctgaaaaggccagtgggatcagagcgcccccagcccccacttttgcaatgcctggagcggccctgtgccttcaagaggaagtccagactcacaagccccttgaagacctggtcctatcctcctccatctccctcctgtcccagaacctgagcggcaagtgctgcacgtgtcccgcaatgctctcgtgtgagccattactggcaagtcttctttctggtgaatttctgtgtaagctcactcagaacttgcccctgaggacccctccaccctacctgccctgggccctctcttaggcactgagttcccacctctggcattgtggccctaccacctttggtactcctggagtagagcctttgccctctagggctctgtccacggcgttgacacatatctggatgcttaacgggtgctcaaatgaataagtgaaacctgctggctttcatttggacagtacagacgtgtccattggattgcggatggctttgtaaccaggggcggtggcatatcaaaaatgaagactttgtaaaatgtatgggaactttctgcctataaagctggctttacactgtgccttcttttttgaacttcctgaagcgtaaaggcgtgcattgaatccgccaggaaggcttttcatggggcaggggcaggctctgttagcagaagaatggcagtgtggctgagggggccgtagtcattggttctcgccattgtattctgagcctttgtgctctaggcttcagggcctctcctttttgactctgtccaccaaaatctaacaaaatcgggactgagtgtcgtctcttcttccctccctgtcctaggccacgtgctgtacgccgacatcaagatggagaatgggaagtccaaggggtgtggtgtggttaagttcgagtcgccagaggtggccgagagagcctgccggatgatgaatggcatgaagctgagtggccgagagattgacgttc

SEQ ID NO: 769 - DNA, 378 bp, Homo sapiens
cagaacaggctccagttgtggtctgtggggaggcctgtgaatgccgatgggagaattccgcattctctgcaaatcagtggcatgttggttgaaagcttttgcagctgtcttgcaggtgtgttagttggaagcttgatctagttcaggggtgtgcacgggagaatatagtcatgggttctcagttggtttctgtttgggtcagtaaagccccttatccctcttttccacttattactagagacagaaacttaaaaaccatggtttcaggctgccaaaaagcctaaaacagaacaaagcaaagtaagacgtgttggacaagcttggtctaggtgctggaaagccagcctcggctcaggcatgccgggcaggatcgcaggc

SEQ ID NO: 770 - DNA, 504 bp, Homo sapiens
aaaggttttggtctttgttctaaatagttatgatttgtttttcttttctgttttgtctccagtaaaaaaaagcttatctttttattttctccctagcttcaaaatagatttttgtctggacataaaatctgttctttaatcttatatctctaaacaaaaccatatggcttactgtcacttctttggcaaggcttgagtttctttcaggatatgttgtaaagttcccataggctgtaagttgacctcacctatagagttagaattgtaaaagagctacattcctattccaaaatttctgcaaagtgccagattgcagctatactcttctagagccccccataattacgttctttttcttcccagaatcctcctcactcactctctattgcagccaagacatgtttggcatagaaccagggaaagccaatagaaaataatgtaacacattattcagtgtcttgtatatttcaaatctaattgttatggaggggacctatactatat

SEQ ID NO: 771 - DNA, 528 bp, Homo sapiens
ctcccaaagtgctgaaattacaggtgtgagccaccacgcccggcagaatttcattcttttagtttagtggcccttagctgtttttgaacgctgacccctttgagacttgataagagcaacttcctaataaatgtacatacatccatatatcaaaatttgaaatataatatctgggagatcaaggatcccatgaaaacatccacggattccctggaccccagattaagaattcttttggtagttttagcccatttctaattgtcactgctaattgcctattgttagtctcacttctttgccccatttatcatctgtctcaatcccttcataattaggataggagtggaggtaacagctgcctctaatggaaaaatcagaggatgacctcgttttctcttttatagttttaccgagataacctgtctgcttttcagccttagaaactgtacaaacctgtagtgctttatgtgtctatttactaatcactgtatcctcagcacccagcatagtgccaggcatgtagatgct

SEQ ID NO: 772 - DNA, 1210 bp, Homo sapiens
ggggaagcagagagtggaaccacatagttcagcaggaaagcctcagttcattaattccaagcaaatctagtaaatggcttcctaccataggctgtgattgcttcagaggagaataaaggaaggttaatcaatggccattttaaaaaatctgaaaaatagatttgactgctaataaaatttagattaaatagtttatttctgaatattccacatcgggtatattacatctgcacatcttagatctgatgcaaagccacactaaatggcttctgtgactaaatagaatccaccttgcatttattggtattgctttattttaaagcattctttaaatcatctatacaatgataaatggtgaaatattacagctttcatgtgcgattaacttaaggagtcttgaattcgtttccattgatgcctcaatcataaaatagggatatcctcttttaaaaccgaggatagaactttgttgtgtttggccaaatgctgttgcaaaatcccccaagcaagaagatttacaggcaaaaatgttgtagacatgacaaagttagaagcatatttagagtatgagattatgtaatacatcattctataggtttaactgttgtgagttttttcagccacaaagggttaaaatgaaaaaatcgaaatgttatgtctttgtgaaacaaataatttactttcactgaaaatattattgaaaaaataatcataagatctaatgacagtgccaaaatatagaaaacaaaagttaccatggaaggtgctgtggcttaagaacatcacagctatgatcatatagtggttagtactctgtgttgtgcctgcagcaacctcagttgtatccaagttgtggcaccaaaaattaaaaaaaaaataacaatgcaagttcactataagtccatagcctaacatctgcctttggtcacggccttgtacttattatggaagcagattattataaagactggtctgaaatgaaaaacgtaaaattgaacttagcaatcaccatacatactaataagcctgtgaagagagtttgcattttttaaaaaaatcagatattagcttgcttgataacagatctttgaaagtcttaaacggactcaagttgaaacattctctggcacccataagcctggacctaacagttctttggccaaaaatgatcccattttaatagatggtttttaggaagagcttttaagat

SEQ ID NO: 773 - DNA, 1780 bp, Homo sapiens
  SITE (1095): n equals a,t,g, or c
ggcaaagttgcctccgaaacccagaaaagttgtgacataaaccctgtacacgtgttcagtgtgttgcacatcacagcccaggttgaactcagccagcaggatcttggcagcttcttcctataatacaataccaagagaaaaagggaattttagttttggttgccttctagaaagctatgacattgctaatacacgaggcttcatttctatgactactctttaaaacatcttaagcattctttcatcctcatagcattattttaaacaaagacacaaaatgacaagactgcactaaaaggtacaaattagacactaaattaagaactaaatatgaaattagaaacccaaaacactatctgtagttatataggaggtagaattactacagatatcattttctcacatgtatttttctgtattttccaattccctcaatgggaatgtgttattttaataggaaaacatcctttaataaaaataaatttaaggaactctgtggatcatcataagatctattctgtggccttttctttttcttttctttttttttttgagacagagtctcactgtgtcaccaggctggagtgcagtggcatgctctcggctcactgcaacctccgcctcccgggttcaagcaattctgctgcctcagcctcctgagtagttgggactacaggcacgtgccaccatgcccagctaatttttgtatttttagtggagacgggtttcaccatgttggccaggatgttctcgatctcttgacctcatgatcagcccttctcagcctcccaaagtgctgggattacaggtgtgagccactgtgcccggttctgtggccttttctaacattatccaagaagccctaaggttccttatgacaggtttggggattgggaaagttcaattttattgtaccgccaatgaaaaggtgctatatttttttcttgaacctcaagggcagaggctgaattaatcatattcctcagctcattccacattatcatggcaaagcctctcttttgctttatttatttattctcttttatcttcatacttaatctcattccattctctgccatgggcaaccaggctaanggggggggtgggtgttttgtatatatgtattattataaaatgaggattcttgttttgaatgtatttctttttaatttgtgaaaaataccattgtgccctgcaatttcactccaaggtacataccaagagatccaaaaactggggtgggcatggtggctcatgcctataatcccagcactttgggaggccaaggagggtggatcacttgaggccaggagttcgagaccagcctggccaacatggtgaaactccgtctctactaaaaatacaaaaattagccaggcatggtggtgggtgcctgtaatcccagctactcaggaggctgaggcaggagaatcgcttgaacctgggaggcagaggttgcagtgagccgagatcgtgccatggcactccagcctgagtgacaagagtgaaaccccatctcaaaaaaaaaaaaaaacaaaaaaacttatgtacatagaaaaatgtgtatatgaatgttcacagcagcactgtgcataatagccaaaaagggaaaaccactgaaatgttcatcagctgataaatggataaacaaaatacagcatggttggtcatacaatggaatgctgtttagccattaaaaaggaatgaaatacccataccacgagatggctgaaccttgaaaacattttgctaaataaaagaagccagacataaaacacca

SEQ ID NO: 774 - DNA, 1779 bp, Homo sapiens
ggcaaagttgcctccgaaacccagaaaagttgtgacataaaccctgtacacgtgttcagtgtgttgcacatcacagcccaggttgaactcagccagcaggatcttggcagcttcttcctataatacaataccaagagaaaaagggaattttagttttggttgccttctagaaagctatgacattgctaatacacgaggcttcatttctatgactactctttaaaacatcttaagcattctttcatcctcatagcattattttaaacaaagacacaaaatgacaagactgcactaaaaggtacaaattagacactaaattaagaactaaatatgaaattagaaacccaaaacactatctgtagttatataggaggtagaattactacagatatcattttctcacatgtatttttctgtattttccaattccctcaatgggaatgtgttattttaataggaaaacatcctttaataaaaataaatttaaggaactctgtggatcatcataagatctattctgaggccttttctttttcttttcttttttttttgagacagagtctcactgtgtcaccaggctggagtgcagtggcatgctctcggctcactgcaacctccgcctcccgggttcaagcaattctgctgcctcagcctcctgagtagttgggactacaggcacgtgccaccatgcccagctaatttttgtatttttagtggagacgggtttcaccatgttggccaggatgttctcgatctcttgacctcatgatcagcccttctcagcctcccaaagtgctgggattacaggtgtgagccactgtgcccggttctgtggccttttctaacattatccaagaagccctaaggttccttatgacaggtttggggattgggaaagttcaattttattgtaccgccaatgaaaaggtgctatatttttttcttgaacctcaagggcagaggctgaattaatcatattcctcagctcattccacattatcatggcaaagcctctcttttgctttatttatttattctcttttatcttcatacttaatctcattccattctctgccatgggcaaccattctaatgtgttatgtataatttttgtatatatgtattattataaaatgaggattcttgttttgaatgtatttctttttaatttgtgaaaaataccattgtgccctgcaatttcactccaaggtacataccaagagatccaaaaactggggtgggcatggtggctcatgcctataatcccagcactttgggaggccaaggagggtggatcacttgaggccaggagttcgagaccagcctggccaacatggtgaaactccgtctctactaaaaatacaaaaattagccaggcatggtggtgggtgcctgtaatcccagctactcaggaggctgaggcaggagaatcgcttgaacctgggaggcagaggttgcagtgagccgagatcgtgccatggcactccagcctgagtgacaagagtgaaaccccatctcaaaaaaaaaaaaaaacaaaaaaacttatgtacatagaaaaatgtgtatatgaatgttcacagcagcactgtgcataatagccaaaaagggaaaaccactgaaatgttcatcagctgataaatggataaacaaaatacagcatggttggtcatacaatggaatgctgtttagccattaaaaaggaatgaaatacccataccacgagatggctgaaccttgaaaacattttgctaaataaaagaagccagacataaaacacca

SEQ ID NO: 775 - DNA, 31885 bp, Homo sapiens
ctgtattatatctatgagcttctggtgaatgattatcttagggttttttttgtatttatgttattcccagcactcccagacacatatcaaatattgaattagtgaatgcatgaatggaaaatggataattacagattgatgttccaaatacctttttccaaaaaaacaagtcatcacatacctataggattaaatagatttcccttaatattttcaaaggtctctctgcacttacgtccattgtttttaaaacatgaaggaaattaaaacacatggctttcttaatcagtcaacctagaattttttgtctgtaacttagactgacaaatactatctattgtagcaggggtaatgactagcaactccctaaagcaatgttggttgcagagatcaacactgataatcatgattttaggataaccagtttatctacagctacccttgtggtcctgggatgaatggtgggttatatatcagcatatgtaacacatatacccatgtccctgcataagggagaatgcatcacctctctaacatgcatcacacattttcctcaacactgacctaaaatgtttgtcagtgagaattttaagaattcaaaattcaacaaaattattgtttaatgtgaagcagtagaaaaaacagagtcttaacaactccccaaagcaatgtaatacaggcagcctttggttttttaaagtgtagatcataataaaaagatgtctttcactacactccgcagaggccattgatcaaggtagaaataaagggggagtacatggcatgtacttcaggacttcaactaaagggtaattgtggaatgagaatttcaaatacaacatagtaactgaaacactagaaaccaaagtatgtgtctgggatccctgcttgcagaaaaacatttatgaagctagtaaggggcgtcttcaccagcagcaggccaaatgccggcaagtgctctgtaggaggggccacttaggaaagtaccagggctgccttggagtggagaaggaggagtggccaccagagggtatacaagtggttgccctttaaaagaagaggctcaggagcagacatgtctttatgctagcctgaagtcatgcatgtgtggctatacatagcctgtgattcagaagacttttcaactttggttttcataaaaatggcaagcaatgatggattacattttaaaagtgaaagcccttgtagtatgagtaatgattcagttttactaataaaaggatctccgtattgctcagattttcagagaaacaaaatggtcaactggtgtgttattccttcctcgtccctctgataacggtactgacaaactggaaaataatgaaatattagagcaaaagagaaatgtgtaataacacaagagaagtctattaggatataaggaagataagtagacagagcaggcttaaaatgaagcttgaacaagccatctgcagaaacagaaaacagggtagatgggacacccaaacagggtgccacagctttccaacttagatccaggttatgagagaatgagccaagaacacaacctaaaagttttcaatttgaggtatattcactgttgctattctatagtattaatcaaaatattattgactaataatcctgttattattaatcacaacttttggttttgagtcttagttttttaacagcaatattttttgtaacaccaggaaaatcctcacaagttattgccccaggggctggaatctggagctagcgtccctaagagactaatatgggagaatttgaaacatctgctatttctaccataattcttattcccaatcaacattacaccacataccacagcaaaaaggacaattagatactagttttgaattaatttgaaaagtttaaagacaacaaaaagaaacagccctctgtttctgtaacagagtctggaaactgcccaagaattacaacgaagttctttaatgaggtagatgtaataggcatttataccttcatctaggctgtagtcatctaatgaattgcttggatgttgtagtaaaggaaattgtataaaattgttttaaaaagatgtataaaatttaaaagtacgaaaagaaatacaggaacaagaatagatgtagtgaaaacttggcactatttctgacaaagtatttttttcaaagtttattcctaaatgtgagcaaagcagtcataaatgaatgtcagaagcagttgtaaagatggggcatggttagttgtggccagctgttttataaaaaatagattctgtttatacttgcagaaagattctgttaatgagcatttcattgtagctgacaaagtagttgggctaggaggccagtcactatgactttgcacatattacaactgctctaggcctcagttttatcacccatataaatcaagggggttgaccagaagctttaaaactcttctgaaatttattatgattactattagaaactctgttcccaccaaccttatcatcaggggttatggataaaataggaggctcttttgggcagcctggtcttctaaaccaaaggacaaaatgctcttcccaaaatcatatgatttttctaccttgtcttctgcctttagtttctaatcttgtctagcctctttgtttgatagatgagaaccgaaccagagatggtaagtgactggcctggggtaccagagctagtaaatgacaaagccagaactagaatccaggtctgctattcgttaagcctactgttctttcccttaagtgataccactcacttgtctttcatccctgacaaaaaacaaaacataaaactgtgagaagcatctgtttagatgatatcagtgagaagtataaattatttcaaaaatataaatatggatgtgataataaatgttaatgcctaaaaacactagcttagcaagtgcatggcagacatttttcagcaatcactggatatgatcttgaagttaaaggaatctcttaggatgaggagggggtggggcaggatactttggaagacatttggagaataaatagaagattggtggaaagtgatgaaaatttcccagaccagaatagacactgtggactactagagcagggagggagagaggagggcatggattaaagaactatctgttaggtactatgctcaccacctggtgatgggatctgtaccccaaacctcagcatcactcaatatactcatgtaacaaacctgcacttgtaccccctgaatttgttccttggtgtgggaacaaaagtttcccagattaaggaaattcaaggagctaaagtacagagagaaaaaatggtataatttggcttagagttaactgcaacttaagtgaatgaaatgccacataaatgggtattttacatatttttcattatgttctatgacaagaattttggggaaagtgatggattgtgctatcacaagactaaaaagcatcactacaagccacggactcctattttgatgtttgtgacctgtctcagtaataacaagagtcctaaaacagttcaggttcattgtctctgttaacaagagtggttggtaagattcaaaggaaccagtggaatgtgaattttatgacaccataattatcttcatgggagaaccaccaaagtgcagaaatgcaaatagaagagaaatctttaaaaaccaaagggtatggcaagatagatttctgctcctagaagcaaattattttattataaggaagaaatatatttaagtaattggctctcagcaaggagtaagtggcttttgtttctagctaataagatttcatttaaaatctattaattgggagaagagaataaacaaaggagcccataccaataataaatattcagttcttctgagggatatgacaaaattttccttcagtactgtggaactcctggagaccttgctcatggtaataaagacaagcctagataccataatattaaagtaatgaacaggaaataacacattaaacactccaagacaaaataagaataagaaatacatatatattgaaaaagtgataaatgtaggtatcctgagattctcaactataaaaagaacagtaatagcaatttgaataatacacataaaatccttaagagtgtctgctacataacaaaggcataacaaataatggctattattacagccaggatgaagaatactaataagagctttcaaactggaccaaccactacttccgtgtttcaagttcatttttagcacatgaacatgatcactgttagccagtgaagtagcttctgactagatcattgattagatctcacaaaaaaccaaaaatagtatatggaaaccaagatgagagcaaaagaaaacgttacctgagtaggcagctaaaacatattttgacattatttttaagcagcattcataaggttcacggagcacagataataaaagaaaaagcaatgtagaagtcttaaaaaccaaaggaaattgctatgaaagaaaccctaatgaaaggtaagagatttccaaaggaaacagagggcaggtgcagtagctcatgcttgtaatcccagcactttgggaggctgaggtgggaggattgcttgagcccaagagtttgagaccagcctggacaacacagactccatctctaaaaaaataaaataaaaaattagctgagtgtggtggcgcacacctgtagtcccagctactctggagtctgagttgggaggactgtttgagcccaggaggttgaggctgcggtgagccatgatgttgcacaactgcactccagcctgggtgacagcgtgaggccctgtctccaagaaaaaaaaaaaggaacagagtctttgcatgcttaatccatgtttatctaattttaaaacaatacaagactggtcatctttttatctaccaaccaagggtcagtatacttatttttatcttagtttatttctaggatgatcttaatttctttttccctgttttatgaagcatttagttcctttctgttcccagtatgaaatttatttttgaagaattctacttttgttttctttaaagccagggactttttcccctattaatctaatcccaaaaatcaaaggtgacgaaaagaaaagaaaatgctcccagccgtgggagcatattcgtggaaaggacattcaaggctacatgtaggaaagggtaaaatataagaaagattccatgcggaccctgatgaagagaaatcctcatgcaatttaatggctaaatgtggaggagaagcaaagctctggaagggtagtgggtgaagatgtaattattatggcttttcctctcgcttcattaatggaagtgctgtttgtgactcagcagtctcttaatagaggttctgaaagttgccagatggcttattaacagattgatctattccaaatttgctccctttcagacattccaagagtcataaattgagaaacttctatttctcagaaataattaataagaactttgattttattgcctttgcccactctcctgattctgttccccttttctttaaaaacaacccaaatacattccccatactacatactgattttagcagtgaaatgaaagaactctctttatatcttcctgtgtaagggctcacaaaaacaggcccagggaacagtgacctaaaatcagacaaatccaggttcccagtccccatcacagtttctccatcctactaacacacttaaggctcaaaaagcaaaattaatgcccaaacagcctgtgaggcacataaaaatggaaaaattttctatcctcatcataccaggcatcagataagatactaaaatcttccacagaccattcatttagaaggggttctaacctttaaaatcatgtactaacatcatcaacactacgacagggatcttggatcacacccatgatggcttctttgtcaaggaagcaaggaagttatatcattttggtgcctggaaattcctatgtggtcgattgaactgcaaagatcttggatccctgttaaaggttgtggatctccacataaatgatatctctgttacagagaaagaaggggctgctgcacttgctagaatgtctctggctttgtatcagatgctacaaatttcatttcaaccaggcttccagtgtgccaaatgccaaacttcatgctttagcaagggaagaaaaggtgagattctaggaacacaccagacctctcagaaggagtcgaagcctgcttcacttggacaaagcttggtcccccgtattagcaccaatctcctgtcatttagttcctcacagattaaattatagcttctctcagagaagacctgggtacggagaaggaattacggtagaaagtaaagtagaaattccaagggcaaatatccacaaggtcagacatcacagcatctgaggctatataagaaagtggaggaattcaatgagcagcaactcgggggtgctcaagcttctctagtcctggtccagcctcacggccccacctgtactcccatcatgggcaccacctcttcaagccacagcaagtccaatggagctgaggctcgtgtttgtcggtggtgaattcggcgtagccgcagaaggtataggaagatggccagtagcaccaccaggatacaggcaaagaagagatagtggttgtatacaaaggagagacggaaccagctaccatgggcttgtcggacaccttcctgccgaagatccctagggaagaattaagaatttgtaggtggaaaaaactgttaagtttcaaagggagacatttactgatttgaaaggcccagtagtgttatcacatttattccatccacataaacattttatgacaccagctccacagagcaggcaaagctgaagaacatcccccgccccaggagcccttctgtgtcttccttcccacggcccccagaagggacctccaggcttacaccctccagaatctaagccaagatgggaaggcctttgaaattgaatcccaaaaaatgaacagaaaggctagattgatcacctgtaacataagtcttaaaatatggcttataaatacagtactaatgagaatagggtatcccctgaatccaataaagaaatcagagtgtgtgtgtctaaatcctttttttaaagttgctatgcagccaagtgcagtggcacatgcttgtaatcaaagcactttgggaggccaggccaggagaattgcttgaagccaggagttcaaaaccagcctggtcaacataacaagaccccatctctgcaaaagaaaaatcaaaaaattagctgggcatggtggcgagcacctgtattcccagctactcagaaggctgaggcaggagaatcacttgagcccaggagttcaaggttgcagtgagctatgaacacggcactgccaccacactcagcctgggcaacagagcaagaccctgtctcaaaaaaataataaaaaataaaggtactatgtttccttaggatctaggatatatctaaataaagctgttacctgatcaactgtattacagtcagataaaaataaggcgatatgaaaaccaagtgtaatggtccacctggctagaacagaagccactcttcagcagtccagatccagatctagttttgtctggtttgacctgcagtgttcttctagaatgcgaatctctaaactgaaagacttcataaaaaatatggatttctgacttttctggacagatgagaactggcaaatgctgggacagtgcttgtgtgtgacagtaaccagcccattaactgggatacatgctccagttgtgggcaacccccacctagcccacttccctcacttctgtcgcctgcctggctgctgacggtattgagtttagaggaacagacatcaaagatacaaaattcatctgagtttatctgaaatagtccagggtacaggtacctaaaaattgtcccaaatatctgacagtacataaaagtaaggtatcaggctaccagagtttgatgaaagtagccccactaaaaacatctcacgtcctttattctaattctgacccaccaaaaagccttctaagtcaatgacacaatgtctggagtgcctctgtatgttatgaaagattgctctagacatcctacccctgttctttagtcagatgtgttttccagggtaacccaagaatgacattttagcttgtcagtatcttggaagtgattagtaagagctcagtcctaaagactggtttgttgtgagtaaacaaataaagctggatttctgaaacagcaaagctgagactccagaccagtaatgctcaaccttctttctgttcgagcatgcctggtagtaacagtggctcacatggaagtaaaggagtttgtttttgtgagggggtagagaggaaggtcacttaagacctattctaagctggttaaaaaaaaaaagaaagaaaccgattctgaggcatcaactgatatcctctgagctcaagataccagattggtcagtcttactttacctgagtggtaagaatcgtgttttatatagaatggctcccagcgtccactgaacctctcggtcatacaccagctgggctgtccgcaggtttgggtagtcatagggaaagtggaatccttcatgtaagacttggtacatccaagccgatttaaaacactgatatctgtgtgacaaaaataattaaattttaaaaaaagagaaaagaattctaatactttcctttgcaataagccactccgtattcccacaagttattaaaagacctacctcctcccgcttcaccttcctcacctctaagtgggttatttctaagtcagcctacttatcttgtgtttaccacaaaggcaataatgatactgtggctgtgtttttctttttcttttttttaagagtccctatcttcagagagcatattaaaatatctacaaatgtaattataggatgtttgggattagcttcaaaacaacccagttgaagtaagagggggattgtggatgggaaaacagataaaaacaagatgggccaggagctgataaatgttagtaggaaagcagggtgacaggtacacaggagttgattacactattctagttttgtttatgttaaaacaatttttgtttttttttgagacagagtctcactctgtcacccacgctggagtgcagtggcgcgatctcagctcactacaacctccacctcctgggttcaagcaattctccctgcctcagcctcccgagtagctgggattacaggcacctgccaccaaaccctgctaatttttgtatttttagtggagacagggtttcgccatgttagccaggctggtcttgaactcctgaactcaggtgatccacccacctcagcctcccaaagcactaggattacaggtgtgagccaccatgcccggcaattttaaacaatttttaactaaaacatttaaaaatgaaaggaccaatgaaccatactggcaaaatgttatttgttgaagctgtgtgatagttacatgagggtttatgttgctattctctctacttttctatatgtttgatattatctataatacaaagttaaaaaaaaaatcacttttggccgggcccggtggctcatacctgtaatcctagcactctgggagggcgaggcaggcggatcacttgagctcaggagttcaagaccagcctggcaacattgcgaaaccccgtctctacaaaaaaatacaaaaattggccaggcatggtggcacgtgcctatagtcccagctacttggggggctgaggcaggagaatcgctggaacccaggaggcggaggttgcagtgagctaagatcatgccactgcactccagcctgggcaacaaagtgagactctgtctcaaaaaaaaaaaaaaatcacttttgttgtcaaatcacttgttgagaactctgtttggtaaccactgatttcttctggctttgctataataggctcactattttggcccctatccctgagaaaatcaagtctggaataatcaaatgctccctcaacatgaaatctaatctgcattattgctcactctccattataatctgccatctagattttaagtccacatctaaggaggaaagggaagtaacttacttgagtcgatgctcatctgcatgtgatgaaaagaggccattcttgaatctctgagttagtaccgaccaagccatgccacagtaatcctggatcaaccacagagaaatagtgcaacatgaatttggaggcaaactctctaccttccccacagtcacagctgttccatttctaaagttacttgtgggctaccagctgacaaaggaaaacagaaatggtgtgttcattcactaaacactgcgtcatacccctgtttattcccgtcatcccatgtctagcaccaagccagcttgatgtggcttctgagcctcttaggcttcagaggggctgaggttaggactaacaaatagcaacgtcaaaagacaaagatagtttcattctactccacataggactgacatgagcagggagagcagatggaagaggatggttagaaacctgtcattggcctccctcggtgttgtaattctcaccaaaataatcattccttttggtttgtatgtctgctatgtgccaggtgctgttctagatgccagggaatcatgcagtaaataaaacagacaaaaattcctgtcctcaggaagcttacattctagtggtaggagacagacaataaacacacacacacacacacacacacacacacatacacacacacacacacacacggtacgttggataacataaatgctcagggaaaaataaagcaggaaagggcaacaggtaatatggggagcgttgtcattttggatagagtggtcccagaaggtggctctgggaagataacgtttgagtcaaagttaaaaaggtaagggaaaaaaatcgcttttacctggaaaagataatatgttaagcccaataacttgagccttttggtgttcaagggaatagaatttgaagaagttttgagataagagaaagagtcaggccatggatagttagggagctctgggctccagaaaaacagggagcgtgaaggtcgtcctggaggctggagagaaaggagcaaatacaaaccaggtgtcccacagtatttcttaaggactgtcttttgggaacagaacagtacagatactgcagatattattttgctggaagccttacactaagagaaccctagagaattgtaagaaagaaagagaaaggtaggcagggaagaaggagggaagggagggagggagggaaatatgaggagaggctgggtacggtgactcacgcctgtaatctcagcactttggggggccaaggcgggcagatcacctgaggccaggagttccaaaccagcctggccaacatggcaaaaccccatctctattaaaaataataaaaattagccaggcatggtggtgggcatctgtaatcccagctactcgggaggctgaggcaggagaatcacttgaacccggaaggcagaggttgcagtgagctgagatcatgccaatgcactccagcctgggctacagagcgagaccccatctcaagaaaaaaagaaatatgaggacagattctcccattcgtttctctgatgaaaaagatagagacacgcaacaattcaaagagatggccctaaataaagcagaaaatgatagaaagctggctaaactttcatctgtccaggtaccaatgatttaaacttatatgatgcttaagtcctatatatgctcagagtgaatttttactcctctattttaaatctaaacaaacttccaccatcattgctttttacaacatctaatattcccagggaccccataccactctgcctcttaatacctcaacccaaaagaaagatgggcttgcccctctgggtgatatcatctccaaaagcacattacaacagaaaatagctagcaagaggaaaaatactggaggtgacatttcttgggcataaacattaaacaagactattggaaagttggaagaaaaaccattagccaacacaaaaattttatgcctgggtaataatttgggtggtatgacatccatggaaaataaatttagttaattagaaggcagtacagcatagctagatccttaagttctctgtccacttcctcatctgtaaaatgagtgttcaaagggctcctgcaaagaacaagtgagattctgtatgcaaagccctttgcacagcacctggcacagagtgaggcattcaataaatggctgctgccagcataagccatgtttatcattaataatttacctgagcagccttggcaaatgttggcccatggtagcggccaccaatgcgcaacacatcctctgtacaataaaaaaactcagagaagccgtagaactcgctgttgttgaagtcaataggcgattgatatatgccattgagtgaggcctggctggtgttggagcgagccagcagggggctcagcattgccccacaagacacccagtctcctcttcctcggacatgtaagacttggctgttcctctccaccacatctgtgagtcccactggcaggcagggatccagaaatggattgtcgggactcagacctgtcttctgaccaagcaatctgccacaatgacaaaaacaaacaaacaaacaaacacgtcatgcctgtattcaacctagtctaagaaacacaatgtgcatcagaaatatcttactactggttttcatgatatctctagaaacgaggatggagtgcaatttcatcacataaacatttaacttcagcaagttaaatttagaaaaaaaagagaggaatatggtgatcaattctgttcgacattttagtcaacatgtgtatttcctagtctgtagtgaaattggagatgtgaatctgctgttctccatctggtcttcattcccacgtacctcctaaaagtgcaaggaccttatcgtgcggagtgtggttctaatgtttaaaaatacaactggtagggggtgaggtgggaaggactgtggggagagattcctgaagagcagaccacggcagtggcccatgtgcaatggctggcaatggtgatggagcccatgcctgcctctgaatgagcagtgctggaacagaacaggcacagcaccagctccaggaagccacctgcagagcctggagcctctgagtggggagaagactggaaagctttgattcccaccatggccgtaacacaggtccagttattttgagtttatacttgcctagcaaccatattctcattcctcaaaatgatgagtatgaagatctgtccaaggacagaaattaagttggggtccaagtaactttgccaattgcagttaattattcatcagttcctaaacagacagatgttgaagagtggacttcttagaatgaggatgcgcccacaggtgtaaagaccgagggtgagaatggaatgaggcagtacaacagaacactttacaacaactggaaccgactattttaaggatgtgacaccaactgtaaggaaaactcagaaaattgttattgagaagagacaatgatcattttgccatctcaggaaataggttaatagactggcagctacacaagatatgccttttactcatcagtcacctgatgtaggtgacttagctacttggcaagaaaataccaacgcatgggaagaagatgcagtctggcaagaagtagtttggaggcagcagaaaacagcagacagaaaagaaaggagtagaacaaaagaagaaaatggaaaaggaagcacagcagctaatgaagaaggaaaaccaaaactggtgtgaaactttcaaaacaaatgatcttcaaacatcatggtgcctgcaggagacatctgagcacctcaacccaagcaatgtttgtatagatttaggagtactttcagaatacaaacacaccacttgattttaatgcattagtcaatcatccagggcaccaggattctcccaaagcaccttgaactcctagagactaagacttacaaaaacaaaatagacttatgggacaatattttcttcaacatgccgtaaatataagataattgattgctgtggataaattattacaaacggggtataccagtacttcttcaagctagtgttcgtagctaaatggttaagtatacgtaggtaagtgtgttgtttgcttagtatcagccctgccctttcatctgtggtccttctctccgtgactgggtttctcacccttctggttacctaggctagaccctcagcactgctggccatcctccctgccctacctacgccaccacaatcaatcacccaattacttaaactggtttcattccaaaattttgtgtaaatttaatgatggaaaagaactctgctttctcttatgctttccttcagtgtgcttaatgataaaataaataattttacagacttaaaaaacaaaaaagaaacaagaaatcccaccactgtttgtacattaaggtctaactacttcatctggtactcaaatgaagaatctgtgatctgtccaatgctaaaggaaaaactgactattatgaatttgatgagagaccattttaaaagttaattttaactatgcttgctttttatcttttagacatactacagaactgaactctcacaaaagatgcaactgcactgtaattcaacaaacatgtcttgaacacttccatgcagaaggaactgctagcagctacactatatattgtacattttaaactggcaatttaattcatctcccttttcccatgatgttaggtctgaatatgggaaacagcaagagatcacaataagctactgtactttatgagtcctaataacaaagatcagaatgcaccctcacccagagtgggactgctaatagaggtctttaagagatgctaccccattggcaggggtagtcagaaagaaggaggaagcagggacttatctgtcttaggaggatgtgagtatttctccctaatatctgcagcctgacattatatttcagaaactcagatcccatatcaaatgtacctgtttttgttaagagtttcattcagaacaaggtcttcgtagcgctgccgggcaaagttgcctccgaaacccagaaaagttgtgacataaaccctgtacacgtgttcagtgtgttgcacatcacagcccaggttgaactcagccagcaggatcttggcagcttcttcctataatacaataccaagagaaaaagggaattttagttttggttgccttctagaaagctatgacattgctaatacacgaggcttcatttctatgactactctttaaaacatcttaagcattctttcatcctcatagcattattttaaacaaagacacaaaatgacaagactgcactaaaaggtacaaattagacactaaattaagaactaaatatgaaattagaaacccaaaacactatctgtagttatataggaggtagaattactacagatatcattttctcacatgtatttttctgtattttccaattccctcaatgggaatgtgttattttaataggaaaacatcctttaataaaaataaatttaaggaactctgtggatcatcataagatctattctgtggccttttctttttcttttctttttttttttgagacagagtctcactgtgtcaccaggctggagtgcagtggcatgctctcggctcactgcaacctccgcctcccgggttcaagcaattctgctgcctcagcctcctgagtagttgggactacaggcacgtgccaccatgcccagctaatttttgtatttttagtggagacgggtttcaccatgttggccaggatgttctcgatctcttgacctcatgatcagcccttctcagcctcccaaagtgctgggattacaggtgtgagccactgtgcccggttctgtggccttttctaacattatccaagaagccctaaggttccttatgacaggtttggggattgggaaagttcaattttattgtaccgccaatgaaaaggtgctatatttttttcttgaacctcaagggcagaggctgaattaatcatattcctcagctcattccacattatcatggcaaagcctctcttttgctttatttatttattctcttttatcttcatacttaatctcattccattctctgccatgggcaaccattctaatgtgttatgtataatttttgtatatatgtattattataaaatgaggattcttgttttgaatgtatttctttttaatttgtgaaaaataccattgtgccctgcaatttcactccaaggtacataccaagagatccaaaaactggggtgggcatggtggctcatgcctataatcccagcactttgggaggccaaggagggtggatcacttgaggccaggagttcgagaccagcctggccaacatggtgaaactccgtctctactaaaaatacaaaaattagccaggcatggtggtgggtgcctgtaatcccagctactcaggaggctgaggcaggagaatcgcttgaacctgggaggcagaggttgcagtgagccgagatcgtgccatggcactccagcctgagtgacaagagtgaaaccccatctcaaaaaaaaaaaaaaacaaaaaaacttatgtacatagaaaaatgtgtatatgaatgttcacagcagcactgtgcataatagccaaaaagggaaaaccactgaaatgttcatcagctgataaatggataaacaaaatacagcatggttggtcatacaatggaatgctgtttagccattaaaaaggaatgaaatacccataccacgagatggctgaaccttgaaaacattttgctaaataaaagaagccagacataaaacaccacatattgtatgatttcatttatacaaaatgtccggaataggcaaatccactggagagagaaagtagatgaatagttgtcaggggtagggagaggagagaatgaggagtgactgctaatgggaaatgagtggggagtgaatatggggtttctttttggggcgatgaaatgttctggaattcaatagtggtggctgcacaactttgtgaatgtacataactttgtgagttgtacaaaaaaatatattaggcattcaggattatttaaaatgttttaaatgccattgtctcacagtttctttcatttttaccaagcactaagattcatcttgaagagccattatattgctatgtgtagttactattttttttttttttgagatggggtctcactctgtcacccaggctggaatgcagtggtgcgatcttggctcactgcaacttctgcctcccaggttcaagcgattctcctgcctcagcctcctgagtagcagggttagaggtgcctgcccaccctgcccagctaatttttgtatttttagtagagacggggtttcaccatgttggccagactggtcctaaactcctgacctcaggtgatccacccgccttggcttcccaaagtgctgggattacaggcgtcagccaccgtgcccggcctgctatatgtaaatctaatttgttgcttgcaagtatgcattccgtaccagtgttgctttccataaccatgttcctttctaaatctgcacacacacaaaagtcatttctttaagacttgaagccccagtcccgcttgtcacctatttcttagtatcagatccatgccttcgttttacctgttaaatacatactaacgaatatagactaaaaagtatcacaacctagttagtcccccacatttccaaccccagcatgaaattctctgctgactgctaaactcacatttccaacagtcctgtggatattctgacatatatgttccttgggtatcttaaactcaatatatccaaaattgaagtcattagttttacaacttctgaactagaagaccagatagacgctctcatccagatctctcaggacaatactgtttgcttaatatcacccctgcccttacccctgttgctcttctctcagttactgggttcctcagtcttctggttatctaggatagatcctcagcactgctggccatcctcccaccctactcacactaccacaatcaatcgctcaattacattgggttttcactccaaactatcccctgaaatctgtcccctccctttcatttccacttactttgtctaactcagccctttattacttctcactcaaggttccgtgacctatattctttctcctactgacacaaaaattttttcactacaaaaagatcagatcacagtcacacaactgacatcatcacaaaattcagagctgagaaggaccttcacagtttaattattttataaatgaaactgaggcccatgtgactgccttactcaaaaacttttggtggttttccactatctatggaaataaaagccagtccccttatgatagcactcaatactgctcatgatttagctccatcttatcttcccagtcttaactactagcacacctgaaaatcctatactgcaaaaggctattcgtcattccctggacattctggcctctgtgctgctttttctgtgcctttgtatatagtgttccctccatgcaggtggccttccctcagcctccactctgcaaaaaaaaaaaagcctactctcatccaaggcccaggtaaatactttaccttccatgaagcaagaatggctcccattcaactttgcaagctaagttggctgccagtccccatattgccacagctctctgtttaaaccagatgttctcaatgatgggcaatttccaccctgccccacacatctggtaatgtctggagacacttttgattgtcacaactggaagggggagggttgttactgacatctggtataggcaagagatatcatatgatgcatgggataacccctgatgacaaagaattatctgacccaaaatgtcaagagtgccaacgatgagaagccctggtttagatcaagttaagcactgctacagtctccctgatatcacaagctgtctccactgacagataaattataagtttttagggacagtgtaactcacatgtctattccttgtacataatattgtctattccttgcacataatgggtgtacataataggtgtacataatggctgtacaaaaagtgtctgtgtaggatgaaacttctccctcaaaatacattctttacattctagtggggtaaggattattagaaggcccagaatggaatcatcagtaaggggaaagggaataacatttattgaacaatagatatgtatcaaatactgtgctccagaatgtaaatgcattatcatgtttatcctcagcaatggcaggagatacctagtatagttataattgttaaaatgtattgaacacttatgctggacagtttgctaaatgctttacaaacatggtattatttcatcctcataactttatgaggtagatactattattattcctttttcacacaggaggaagctgaggctcagagaggtaacctactcaagataacgcaagctagcaagtatctgaacaaatatttagagccaggtaggttggtctaagtccaaagacagtgtccttccttctcaaatactagcattcctagcaactaaatttccctaaaaggtaaagtacctgctttgcaggaaggacagaggttgaggtaggaacttcataagcaatttggagagaggctcctcccatatccagtatccctactgtccttctccgtcctgctgccaattcctgggtagcctcagcatctgattctgaaataaataagagaacaaaaaggccctagtaattaaaaaataaaattaagtcaaacccccaaaacagcaatcccttgaaaatttgaaagcaggcaggtgccatggctcacacctgtaatcccaaaacactgggaggccaaggtgggaggattatgtgagccgaggagttcaagaccagcctaggcaacatagtgagacactctcataaaaaaaaaaaattttttttaattagctgggcatggtggtgcacacctgtagtcccagctactcaggaggctgaggccagaggatcatttgtgcccaagagtttgaggctgcagtgagctattatcgcaccactaaactctagcctcagtgacagagaacctgtctcaaaataaaaaaaagaaagcaaacaagtatactaactgaatcaactatatattacacaaagaataattcttgtgaattacttaaacatgacattttgactacgtatccctagtaggatatagcctaaggacaaaagaaacaaatatcttaagctacatcgcagtagtcttgttaacaatattgttggttttattatttaaaaattatgaagggagactgaggcaggcagatcacaaggtcaggagttcgagaccagcctgaccaacatggtgaaaccctgtctctactaaaacacaaaaattagccgggcatggtgctgcacacctgtaatcccaactactcagggggctgaggcaggagaatcgcttgaacccgacaggcggaggttgtagtgagccgagattgcaccactgcactccagcctgggtgacagagcaagactgtctcaaaaaaaaaaaaaaaattatgaaacatattgtggaataaaacaaataaatgtttatgtcaatatctttaggaacaaagattcagcataacagaacaaaaaggatataggtataaaaatcaaataaattaatagcaccctataatcttacatatgagtcagaaatatgactatgaactcatttatttttctctttctaaaaaatacatatttcctagctgtgttcactgaaaggcctagaagcaatgatatcccaggagtaatgaccacctgtggtatctggaccaataatctctaaataccatcttttactaaaagaaaccagggctcttttaaaaacaggccaatgccaggtctagggtagaaagtatacaagatgaccctggaatacattgctgtaccagatagcaaggggaatataaaagagtattggggtcatattaaaaggatacagcagccaacctaaagatgctccttaaaatactaataatgtgatgggctctaatgcatctaatatattaaaatccatgagttcataataataattaaaacttttttttcactggttacctttggaagttgctagacaccaactcattattcagaaatgtgataaataaaaagaatcaaggatttattctgtctttcccataagaactatatgtcagggtaaccaaagagttgatcaagaaaagttcattacataaaaattctagctgttaaatgcagaaggaatgacagaattagaaatatcaccattttgcaatctctaatgaaaaacatgtccaagcaatgatcacaattggctattaccacaattccatgaaaggcagataaggaattttaatactaagttagatcaggctgataatacttgaactctcaatacctgatcagtctgagcatgacaaaaagtgagtcaaccagacattacaaaactcctgatgtgagtagtggaaaacacacagcgccttctatgatttagtcttgcagatggaattgaatctgagtctaatcaaacatctatatctgacctccagtttaaaggacatatgaggggataagaaacatgttaaagaaaacatgttaaccccacaaagatgcagtcaatcaaatctagcatgtggcaaattctttctaccaggtgatccaattttttcttgcttttaaaggcaggggagtgaggtggtaaggttaacaattatagattaaaagagactaaagagacatattaatcaaatgcaatgcatgacccttgttcagattctgatttgaacaagcccactacgaataaacattcttgagaaaatcaggaaaatctatacctggatagggtattagatacgtattgtatgatattagaaattgttaattctattaaatttaaaaatggcattatggatatattttttgttcattttgaaaccccttatctgttgtagatacatactgacatacatgaaaataaaaattacatgtctggggtttgctttttaaaacattcaatgagaaaaaaaaacctttaatacatggggggatatgggggagaaatggcaaaacattagtaaatattgagcctgggtaatgggtccatggaggttcattttattattctacttttgtgaatgtttgaaactttccatattaaaaagttaaaaagaaatcaaagaaagcaaattaggactggaaaatgaagcatcttatgtttgaaaaaagaaaaacaactcaaaatttgcatttacatgctactgataggttataacttaaatcttcagcccttaggtaaactgtcataaaaagacaatattactcaccatcctcgtggtcgaatcttcccaaaacaaagttgattccaatccatgcataaacccctaagtaagaaacagaaaagccctcacttaattctctactgctatgccatgtatacacctctcccttagggcttctctttcctctttttcttggaaaaagtaatcatagtattttattccatactctcaatgtaggaatttcaaatctttcatcttgtgatttttttcccttttaaaattatttgcatcttctaaatttcctcaatgaatagaaattaattgtataacaaatgtctaagaagtataaatcatctgaatgtcacgaagatatcgaaaaaaaagaaaaaatgtaaattttggagttctagttctgggcaatcttgtctccccactgaatacaaatataaactctagatagaatgcatggagcagctttctggaaactctgaaagtaaatgataatgagcacaccgggaaagagaccagggtttaaactaccaccaagccagtagtgagtgtcccattttttccccctcagatattacctggtctagacttaagagcagcttgaaacatgaaagtaaacaccaggtgtgaacagaggaacttcaactcattttctggtccaaagaacagaaaaaggaatgccaaaagttcagagaaaataagggaaatctcctgctttttttttctttcttattttgttctctctaaccttaggcaacagaggtagaatttgagcaggtacctaaaactctgagggctttgaattcttttctctgaccagagaagctgtagcttcaagactgtgaaacaaatcctattgtttatttaggctccctctgtcctcctaccgcttggccctggatgcagatgcagtcatgagaagtgcatggcagagagtgggcaaattaaagccctggtattctgacaggaggatcatgaaagggagctccaaggaaccagaaagtggcagagggatcacagacagtagggagcaaagttgtgtatgaacccctgggctcacctccaagctacaaatacatggatctgaccctaaacaatatccaaacagctctgagagctgaactacaggctaggccactgcccaggttccagattagccactggctgatacacaggacaaatccaaatagcagtggccaaggctttgaaaaatgaatgaataggctgggcacggtggctcacacctgtaattccagcactttgggaggctgaggtgggtggatcacgaggtcaggagatcaagaccatcctggttaacacagtgaaactccgtctctactaaaaatacaaaaaattagccaggcgtggtggcacacgcctatagtcccagctactcgggaggctgaggcaggagagtcgcttgaaccagggagcggaggttgcagtgggccgagaccacgacactgcactccagtctggatgacagagcgagactctgtctcaaaaaaaaaaaaaaaaaaaaaaaaagaaagaaagaaagaaagaaaagaaaaatgaactaatagaatcacgggccggccgcagtggcttgcgcctgttatcctagcactttgggaggctgaggcaggcggatcacgaggtcaggagtttgagaccagcctgaccaacatggtgaaaccctgtctctactaaaaatacaaaattagccaggcatggtagtgcatgcctgtaatccaagctacttgggaggctgaggcaggagaatcgcttgaacccaggaggtggagattgcagtaagcagagatcacaccattgcactcagtgttggtaacaagagtgcaactctgtctcaaaaaaaaaaaaaaaaaaagattcacagcctacagaaagcagctcagaacttgagatcaactgcctcctaaaacaaaaaaaaaaagttctctttgatttaaacaggacccagagtctcataatgtaatattcaaaatgtccaggatggaatataaaaatacttggcatacaaagaaccaggaaaatctcaactcacaagagaaaagacaatcaaaagatgccaactctgagatgacacatatattggaattatcaaagatattagagcaaccatataaccaagaaatatgggcagtcctacaatgaatggaaagatagaaggtctcagcaaagaaacagaaaagaaaagaaatagaatattaagaagatcaaaatagaaattttacaactgaaaaatgcaatactgaaattttaaaaggtaaatcttttcccatgtatatgtctgcaattagaagacatataaatctccttctcgtttataagaaatggaaatataattcatcaaactggccaatttggctgcatgagaacacatattcactctaaaagtacaaacccaatagtgtgagattccagggaattatcaatactgcatagtaattgcaatgaaggcataacaaaacaaaagtaactcattctgatcatcccttggaattaaagtttctccttactttaataatttaccttacatttgactttgacaaactcaatacaactcctagaactatatatgttttcaaaagtacagttagctaaccaaatatccaactgaaatcattaaatactaatacattcttataaacatattgcttagtactaagttaaaaagagatatacatttttgacttccagaaccagcattctaaacagatgccaatgcaaaatatgcaaataatcaaatcaactatgtagcagaatcaagaaaattattggcagaaaaattaaaatccgatatatagaataattctaaacacccgttagagaggctgtgccatggttggcttagaggttaaccagctgcaccccttaaggcccagtaccttcctgcttcccagagatcacttctgcttgagactgtgaaaagaggaagtcaaactccagtggtaaatctttcactaggtcagccaagatagccaactgcttcctgcaagaaagaacaaaaaatcccaaagttagtcactaaactctcttctcataaactgcctcaacttgtccttctacttagccttgtcatgacctcactgttcacctacctcatctacttgtccagccctgcttctttttggtaccgcctttgattttaaaagtttaaactgcctccaggtatagcctcctacctaaaaggcaacatggtaatagtaatactttccccttatatgatgttattattcaaagagtgttaaaagatgaggctatgagactacggttctatgactctcacaggctgagtacaaacaagccacaggaaactgcagccaagttgcataaactataaaattgatgtaattacattattcctcactactgtaaaacaaagatgttaaattaaggaacacaatctcatcctcaaatcttacacaacatagaaacaatgcttcacattaccacacaagatgtactgttggttccacaagttttaatgtaatcctttacataagctaacaattaacttttttttgagacggagtttcactcttgttgcccaggctggagtgcaatggcatgatctcggctcactgcaacctctgcctcccaggttcaagtgattctcctgcctcagcctcccaagtagctgggattacaggcatggatcaccacacccggctaattttgtatttttagtagagacggggttgcaccatgttagtcaggctggtctcgaactcctgacctcaggtgattcacctgcctcggcctcccaaagtgctgggattacaggtgtgagtcaccttgcccagccacaattaactttttaatctccttttccatatttcaagggttgatttttttttcattgtgaaaatcttaccatttgaaaaccctagatcaggatcaaaatccagaggacataacaacatttccaatttggggaaaacacttgaaactttgtatctatagggttgtctttcctctaacattttaagcatgtaatcaatattatcaagcaaaggaaagcaaagaaacaaagctagaagtaataatatgcatctagagaaaatgttagttaaaataagacaagttatcttggattaaaaaatattcaatacaaaaatattctgctggctcagacagttgtcagtactacttgatgaagaatgttgttagcacttcaaagtgaagatctatatttgaagtaataatcttccagtataatgtcaagtatagtttcttaaaaaaagttcattgttatacatattaaattcttgcaataagaatttcaaatggggaccaagaaggggtattcttctgtccctattggatatgcttctaaactcctcaaagagagggttcgttggttttggcaatgatatggaagaatgggcaacaacatatgttgctgttagttatgcaaattactagtacaggctgggtgcagtggctcatgcctataatcccagcactttgggagggtgaggcacatggataacctgaggtcaggagtttgagaccagtctggccaatatggtgaaaccccatctctaccaaaaatacaaaaattagccaggcatggtgacagacacctgtaatcccactcgggaggctgaggcaggagaatcgcttgaacccgggaggtggaggttgcagtgagccgagatcatgccactgcactccagcctgggcgatagagggagactccatctccaataaataaataaataaattactagtacaacctttctaaagggcaatccaggaccatgcttcaaaatgtttcaatgtgtttaacctttgatccagctgttatacttttagaaattaattccaaggaaatcatcaaacaataaaataaagaagagaaatactgcagcattatttataacaatgaaaattatttataacaatgaaaaactggaaataccataccatagggattggttaaataacttatggcacagccatgcaatgtaatactatacagatgttaaaagaaatgaagtctacttatatctacatgtatagacatgaaaagataagagatgtccaatacattttacaaaacagtatgtataatgtgattccatttatgctaaaaaaacaaaaacccaaatcattcttcatgtatacatagtgacaggataaagctttcatcttctaaaattcaatattgtttatttatttaaaatgcttttaaaatggcgaaatgttgataattgttaaagctgggtagtgggtaaatggggatttactgcactgttctctttacttttatacacaagtgaaatttcctaaaataaaaattattattttattaaacaccaccttgtattatggtgtaatttttaagggattttttttaactgcaaaataaaagggaggtagaaaaaattctgttagtccaggcctttggcaaagaaataaaaccaaatgctaataaattcaaaatatagtctaaatggttcaaccctattttgaatctgcttacaaatgctaataaattagcaaacctttaatcatacaaaacaggttcttatactgatagtcacatttatgccaacaactcgcttggacttagaggcagcaatgattttataagcctagaacagatgtatgcattatttagagaggtgaccagaaaacaagttgaaagagaaaaaaaaaaggcaaatttctttaaaaattctttagatacaataaatattaatattcagagtttccacattgacaactaacatcttagacaaaaagggtggagctacacagtgggttttgtttggatggaaacttctttgacagaggtaataccgaacagtgccaggaggtgaggcaacaatctcctttcctccaaacacactaaaggtagccaaactaccaagtgggttcctctgcccagctcagctggtcaattctgcctttttaacctccaggtcagctttttctctggcctccctcccctttccttggccttttatagactttgtgatgtggcacctgctcttgtgtcatctatattcttcccagggtttctaaaatttttgaacaatatgaatatcacctatgtcaaataaaaattcttaattgcatgcacagtatgattgcaactttgtggaaattacatatatgtgaacagaaaggagggaatacaacaaaacgaaacagttttgatagggtagcagggttgtaagttgtattgtattgttttgttcatttttaagatttcccttaaggagttaaggctgcagttacaatatttaaagtttggttttaaagataagtaaaaacaaaacaaaaaattttttaaagactgaaatgtatggggcaataaggaactaaaaaacctctcatgttgacaaatggctatataaataatctgcttctcaacagtaaaccagtcagtaaaccagtaactgtgaaaaaaagtccactgaaagaagcattgctgctatatgttatgttgtctacatgtctgacataagccttggagccctacatgtatggctgaggtttttgttgtttgctgttgatttaaggaaagaaagccaactataaaatttaaacgttgtaaaaaaaaaaaaaaactgctgttgaccaaaggaaaatatttaagctaataaggaaatacctgatgcctatgagaccatgaacattccaggaggatgaattctaaagttaaggttggcaatggtctcattgatatgacaccaaaaggcacaggcaaccaaaaataaacaagtaagactatatcaaactaaaaatttctgtacagtaaaggaaaaaattaacagagtaaaaaggcaagctacagaatgggaaaaaatatttgcgaactataccttggtaaggggtttatctttaaaatattttagaaactcctacaactcaacagcaaaaatcctattaacccaatgtaaaaatgggctaaagacttgaatagacatttctccattcacagaaatggccaacaggcatatgaaaagttgctcaacatccctagtcatcagggaaatgcaaatcaaaaccccgatgacatatcacctcacacttgtcaggatggctgttatccaaaaaacaaaagacaacaagtgttggcagggctgtggagaaattggaaactctgcatactgctggtgggaatataaaatggtgcagcagctctgcaaaacagtatggaggttcctcaaaaaattaaaaatataggccgggtacggtggctcacgcctgtaattcagcactttgggaggccaagacgtgcagactgcttgagcccaggacttcaagaacagcctgagcaacatggcaagaccccatctctacaaaaaaaaatacaaaaaattagccaggcatggtggcacatgcctgtggtcccagatacttgggaggctgaggtgggagaatcacctgagcctgtgaggtggaagttgcagtgagccgagatcatgccattgcactccagcttgggcaacagagcgagaccctgtctcagtaaataaataaataaataaataaataatcaaactgtcatatgatccagcaatcctacttctggctaattattccaaagatttaaaatcaggatctcaaagagatatgagccctcccatgttcactgaagcattatttacaataaccaagatgtggaaacaacctaaatgttcactgacagatgaatatgtaaagaaaacatggtacatacacacagtggaatactatttagacttttttaaataaaaaagggcattctgcaatatgtgacaaggtggatgaacactaacgacaatatgctaagggaaataaataggcacaaaatttcagttaagcaagatgaataagcactgaagatccactgtacaacactgtacacacagtcaacaataacgtattgtatacttaaaaatttgttgggccagacatggtagctgacgcttgaaatcccagcgctctgggaggctgaggcaagcggatcacttgagcccaggagttctaaaccagcctgggcaacatggtgaaacctggctccacaaaaattagctgggtgtgatggtgcccacctgtagtcccagctacttaggaggctgaggtgggaggatcacttgggcctggggggcagaggttgaagtgagctgtgatcacaccactgccctccagcctgggcaacagagcagaccctgtctctaaaaaaaaagaaaaaaatctggttagagggtagctctcatgttgtatgcttaccacaataaaataaaaatcattaaaaaaaaagtcagggagctcattcttcccccggcctacgtaagtatggacggatcaaggtggtaccaaaggagagaaatcacaaacaaggagtctggcctaaatacagccttctcttcctcttcctctaatgcaggaagagggatcaggtggcaaggtgtcaggctgaattgcaaaggtcaagtggaaatgatgtgactggctggggctgagaaaacaggcctaaggcaatggagactgagctttgcagtagcagcaagaagagggactcccccagttattgccagggttctaggcagagttacagaaaaggtagtgttcctaccagagctctctgactagtccctaagtatccaggtcatcaggtgaccctcttcctaatttattctgtaattatgttctctatgtgcccgatgatccaaatctattaccatcaccactactcccaaccctcaatccaaactaagaatcactatagtcatcccagatagatactgatcccaaagcagcaaatgacaagaagttgggaatgaatgattgtgtcataattgggtttaggggtatagaccagggaaccacagaggacagtgcatgaaactggcctttcatctcttgtgccaccgttttcctgtgtttcctgtaccctgcatctcacctctcagggagaagcctcatgcctgctgtgcagaggatgtaaagaggggtctccttgtgcttcttcacaggcacatgagcagcagcaaagctcagcagaggacgaaggtaatcactggcatgttctggagtgtctgccattgcagagattccttaagttaaaacaaacaaacagacaaaactttctttaaaaagcggctcacataagactcaggaaactgataccctataaagttctcctcaaggtcctaaacatttatttatttgagaggtagggggtgacaatgaaagagatatccctcccattacccagactctcaagaagaaaggggtagcttgctttctgcttcttttgtctcctctttcatgccttaaaagagactgacaacaaaatatattctgattagtacctggcttgatttttttaaccactggttggctgttgcggtctctcatctgtttgatgtccagcaagtcatgggggttcccattatgtcttggccagaaataaacaaaaatccgggaaccactgctgccacagtcaacaacaagtccataattcagatttgggtcttcagtgtcagtagcttcaagctcccctactcgagc

SEQ ID NO: 776 - DNA, 303 bp, Homo sapiens
tctttttttttcttttttctttttttgagatggagtctcgctctgtctcctaggctagagtgcagtggcatgatctcagctcactgcacgcttcgcctcccaggttcatgccattctcctgcctcagcctcccaagtagctgggactacaggcacccgccaccacgcctggctaattttttgtatttttagtagagacggggtttcaccgtgttagccaggatggtctcgatctcctgacctcgtgatccgcctgcctcagcctcccaaagtgctgggattacagacgtgagccaccgcgcct

SEQ ID NO: 777 - DNA, 23934 bp, Homo sapiens
tgtaatagtggaaatttttattttacaaatgaaaagtcaaaatactgctttgaattgacccttaagtcacactctgaattcataccatgcagttaaaattttcccagttcatcaattaattccactgaaaacagactaagcttctgtctatggaagaagcacagaccagctttaaccatgatgacaatcactggtaagactaagcaaaggaagtgactgtatctctgtttcaaattctttttcttcttgggcacattctccatggccatgtgaaacttaaaacaaagattgcgactgtcctggccagagaagaaggttaaagctgtgtcatagagaattgcagattatagttctaccttcatcctgtgatatccatgtctctcagagaggtctggctacaccaggatgttctttgcgatagcattcaaagtccttactttggtcacatctgttacctttagggaatattctgagcaagaaagtgaggctcccatggcaacagatgaatttctgtaacagaaataataaaggaacagataattatgttattaaatgggccctcctactgccgcttcattttatagactatttcatgatacaagggtaggtcaagtatgctggactagtatattccataattttcatcaattaattacttgaaacatccagcagctgaatccactggacagtatacttgattttatatctggaattgtaagttctaaggctcttgcttccttttttttttttttttcctttttaaattacaggcatgtatcaccacgcccagctaatttttttgtacttttagtagagatggggtgtcaccatgttggccagactggtctcgaactcctgacctcaagtgatccacctgccttggcctcccaaagcgctgggattacaggtgtgagccacctcacccagccagccatcttgcttcttttacattgtgtttttcccaatttataaacagaaatattcaactactattaaattgtaagagtcttcttaagtatttaaaaaaccccatataatactcacaatttcttaatggtaatataatttcaaaataactgaaaacagagaacaaatgtgagggaagactaagtactaaaggtaggagggagaaaaatgactgactcttccatccttacaccatagttattaactttgctacaggaaatcataggcgaatgggcacatgtgcatatctgactcatttgaagctcaactgcagaatttgtttactattaactggtctaagttcagcaatgcctttacaaggcaaggttcacctatgttcaaagagcctgtttatttaagacaggacaagaaccattttagaaatgtttttcaactacaaaaacaactacaatacttatgtagtagtcacaatattccattgattaatcatgcccccatccaaagtttttctatttgggagaaagtaaaaattaatctcatccttcttatttgaatcgaagaatacatttttaccgaaacttcattcccgagtctctagtagaccgagcagaacagtggaattctgtagcacctgaaccctcaaggatcctttgtagatttctgtctgttataccacctcctgttgcaaagaataagtaacacattaagtaaaatagaattttgcataaaatttaaggaatagtaacgactgcttactttacttggaatccccaaactgaatttctcattgattcaaaaattagtctctccctacccagctagaatgagattagagaagtgataaaagatatataggctacagactctggggaagtaccattaagtttatagaacatgtatgatagaatcttatctgtccattggctaatataacaatgctatccctgcttgtccctcaattaaagcaaaatcaaattaaaaagaaaggtaaggataggtttgaggaaaaaaatctacaaaagcacaacctcagagatgtgtctgaaagagaacctctgttctgtctctagccccagatgtaaagactacactgacttcattggaaacaggaataatgcaaggtattatacaggttattagttacgatatcagctttatacttcatttcacagaagaatctgattctactttattaaaactgtaccaccaaatattttatgacatttgttttgatgaacaatcttttaaatatttatatataaagaatcatattctgaactgatactagtgtatcataaatatgaaattagtttattcatctttatatccttatctccctataggatgtactcaatattttaaaactatgtactttgtatctcaagccattaaagatgctgaaataacctatttttacacactctttcagactcattaacttgtctttttttccttagtagtacagtaatatcactgagccttaagaaatagaaaaaaggctgagtgtggtggctcccacctgtaattccaacactttgggaggccaaggcaggagtatcacttgagctcaagagtttgagaccagcctgggcaacatggtgaaaccccgtctctacaaaaacatacaaaaattagctggatgtggtggtgggtgcctgtagacccacctattcaagaggctgaggtaagaggatcacttgagcctaggaggcagaggctgcagtaagctgagactgcaccactgcaccatagcctgggcgacacagtgagaccctgtctcagaaaaaaagaaagaaatagaaaaaatacaggctgagtagatttagactgaaatcctggctttatcactgtagctcttcacagctatgtgatcttagataaattatttaaatccactgacctcaacttttttgccaataaaagagggataatactggctacctcacaagcttattgtaaggattaagagacaaatatattatttccttctattccttctaacaaataacaaaacatctggccactgaaacacatgttgctaagttatcagcaacttaagtacataggtaatacatctttccagactcagactaacacagctctatggttaaaaaggatcccacagaactagtttaatattcttctctttatagatgaagaaaccagagcctaaatatgttgtaggtttcattatgaaagttcctagagggcaactacctctttatatttctcaatgatgaatacttattaggcattcagaatgacttacctaggagtttttacttgctggtacttattcatatgaaattgtaatacatttgtgtttataagtctattctgtgagctcctcaagtaggattactttatttctgttttcatatctatcacacaattagcataaaatatacataattgtcacacaattaacatttacctgataaggtttgttaaagaaattaatcacaaatatttttgtatgtaacatcttttgacctgagtcagcttcttgagaacgtagtttcttgtgtagctttgcatcccaagtaatgccttgcacacagctgataacaattgcatattaaacaaaggtactcttaatgtcaacaattgtctaagtattacttgtcaaaactatatatatttagtgctaaatggaaaagcatcacactcagagtctctttaacattccttgattaaccaaaaaggaccacaatttgacagataatatatactttctctctgcttatgtttcaagggcttgttataggtcaaagccttcctaaatatctgacaataccccttatatggcctttttttttttttcttttgacacagggtctcactctgttgcccaggctgcagtgcagtggtgcgatcatagctcactgcagccttgacctcgggctcaagaaatcctcccacctcagcctctagagtagctgggacgtcaggagcacgccaccatgcccaactaatttttttacgttttggtaaagatggtgtcttactatattgcccaggttcacggcctctttttaaaagttactctttatctaggtgtcactattttgaacgctggtcagtcttgacatcactagtagtgagatgaccagagactgaataccttctgatgtgatgtcatatgatgtaagtatgcagaatcacccatgaagtattctgaccaaaaatatttaagcagagtctattcaaacctcatgatttaactattagtttataggatatacagaggcacgaggaacaagctaaacaatatcatgaggaaataatctgataaatccagaaagtaggacattttacagggtaagtgatccaaacttttattttattttgagacggagtcttgctgtgtcacccaggctggagtgcagtggtgcaatctcagcacactgcaacctccgcctccttggttcaagtgatgctcatgcctcagcctcccaagtagctgggattacaggcacatgccaccatggccggctaatttttgtatttttagtagagacaggatttcaccatgttggccaggctggtctcgaactcttgacctcaggtgatctggctgcctcagactcccaaagtgctgggattacaggcgtgagccactgggcccagcccaaacttaataatgtaacttttttttaaagcaagaaaaataaaaggaaaaacatctatattaaagatattttaaaagataatagaactgggcatggcagcgtgcaactgtagtcccagctacttgggtggctgaggcaggaggatcgcttgaggctaagagttcaagtccagcctggccaatatagcaagacctcatctctaaaaacaaacaaacaaacaaaagataaccaaaaatgtaatgcttgttccttgactggatcctagtttgaacatatcagctataaaaaccattgtggggacaattggagaaagttgagtattaaatgtttattgtgatagatgtgataatggaattgtcattatggtaacatcccaccctttttagagataaataaagataaaatgccatgatgctttcaatttaactttaataaaatacctcaggatagaaaaaagatgagacaaatttggcaaaatgttaaatctagggaatgagcatatgagtattcattatgctattttctacttttttatatgtttgagaaacttaattaaaaaaattaagattgtctttacatttgtctcactcttctatgttgtattatctaattctttaaaaactgctccaactgttcatttctagttagccattatgaacttaactgatcttatggttatcatcaggatcatatgattaaattctggttacaagaaataatttggcaatcagagattttcaggaactgagacagtattatattttacccaaggatgttgcctaaacctttgcttaaaccctgtttattaggacatttgtcctaaacaaaatatgattagcatcaaatttgatgtgcctcaccagagatgaacatctgaattcataaagttctatataatgggagagcaaatatggagaaacctcaatctctatctgcttccttatttgctcctctttgagctaatgcctattacaatattttccttcttatctaaacttttaaattctagcacagatctcccagttttaaacattttaatcaaactatatattcttctctttaaagatcatgtactaatatgtaatgtactaatactctctctcacattttcctgcctcctttgctcttcctccactatagttcagtgttatgctagtgaattgatagataaataaatacctggcattaccacaatcctgccttttgcctgaaaaaagaaaaaaaaaaacaagtgaattttaatatctttctcttgaatgggataataaggcagtgagaatagaaacataagtcagaatatattaaattttaaaaattactattaatgtttaatttttactagatcttctctatttctttgggatcttggacaagtaagatgtccagcatagtaaatttgtctctagaaaattatctttccaaaaagtcattttcccccccaataagtgccattttctccttccccttcacctattaagatggtatataagcccccaattctaagtcatatttctttgtgaacttctgtatgtacttacatatatatgtacttatgtgataaaatctctttttactcctgctaatctgtctttagtcagtttaatttgcaggcccccaataacaaaccctgaggatagaagaaaagtttttcctccctgacatggtgagtaagagaaagttcctgctctcatggagcttacacattcaagaaagacgagacaatgcacagggatatttatacaataaaattccaggtagcaataagtataacaaagaaaaaataaagcaagtgaataaataaagcaaaaaataaagttaacaagagagtgaaagaggggagtggctatttcaaataatttaaaaattgttagggaaataaatggaacaaggatgcttcatattctcaaatggcctgaacaaagcatccataaaacaaaacattgactatctaaaaagctgaaatcacttcagaatggaaaaaagtcatatttgcctgtttcttccaaatcaaggctttccaaaacatagagaaataatatttttaaagaaatgaattctaccatttcttttcgccttccatacaagattatttagaagtatatgcttatctaaggctatcaaagtgatttaataatatagagcagtcactaaatgtcagatttaataatatagaacaattactaagtgctataacctgaagaaatccctcacaactattctaggaggtaggtgctattattatcctaactttgcagaagagcaaagctgaggtttaggatggctaggtaatgtatccatggtcactattagtaagggtcaaagccagggtttaaacacagacctgtccaatcacaaagcctatgctttaactagtatgttacactactaggtagttacttcagtgaagttaatgtatgagaatatttgagtagctcttcctactaaccaatagattaacatacaaataacagacatacacacacacatacacattttgaaatgcaatacattactatggcggttatatcttatttgctactccttactgagtaaccttttaaaactggaaacctgactcatcaactcttctattttaaaacactttaggcctccccgctgcaccatgaaaataaatactttaataaggttttcaaggctctggatatcattctgtccacattcaatattctggccattcctcagtgttttaagttatgcttgcttttgtttatagcccttgcttatactatttgttttgtatggaacaattccaccaacatccccttcaccctcactcccactgcccccaacttttacacagataactcccaaacatccttcaaatgagtaaaacactgcagtctggatgtcttttcttctgggaagcttcctctaattattgccaaccttcatttccccaaatttggggttaattcctctccaatgtactcctatagtaccttttaaaaatagagctctattaaaattgcctgctctattagaagtgcctgttctgcactaaattgtaaggatagtgactacacacagacacttagcccttggttacccccacagtacaaatgtcctgcatctaatatatatttaataaatgtctgtgaaaccattacatcccagaatagcaaagtcacatcagatctttaggagaaatttctgaaaattattttcatggctatagaaaagtgaaaataagcagatgtctacacaggaacattagtattattaataatagcagtaataacagaacctaacattattaagacctagtatatgccaaccactgtgctaagcctctaacacatcccatctttagcaatcttctgagaaactctaaaataagtattaaactcatctcagtttcacacagggggaaagagaggcttaaagactattaacctgctcaacatcacatagcaagtatcaaacccgagtctcaaacgctcaactctctcatctcaaagtctgtactcactaacttataatgcctctggactgacatcagaaaaatacacatactattaattacaaagtcaccttctgagtgctctacaaatgatgctagctcaccaggaaaactcataaaatagaaaaatatatttcctcttatattgacagatgagaagaaataagattataattttagttttggaatttacctccagatgataattttatatgggatcccctgaatatacatgggctgacaatgaaaagatgtggcttaaaactgcaatgctggctgggcgcagtgcctcatgcctgtaatcccagcactctgggagggcaaggaaggcagatggcttgagcccaagagttcgagaccagcctgggcaacacagcaagaccttatatctaaactaaaaaataaaaataaaaagtaaaaaaaactgcaatgcccatggcagagaaaaggtaaaatttgctgtgcttatccaagttagatcagatctttaggcactatctatatgtaatttgatcttgaaagccttggttattaaaaaggcttgtgtgaaagaaataagaattatatacattattgcctgcttgcttttcctacagagtaaccacaaagtcagtaatatatagtctcacaaactggctaaacagcagaatgtcaggagtaaccacaacagagtcttaggggaaaaaaagataaagtccacgtacctgctcaatgagtcgctttattaggggtagcccttctaatgctgaactgtcacatccactggtcaacacgcgttcaaatcccaaggttaagagggtctccagagctgccattggatcatgaaccatgtcaaaggctgaaataaataaaactgatgtgaattttgaacaggtatctctaacgcagagtttcccaaaatgtagtatacatgcagtggcatgctggacctagcttgtactggcttacaaaggccaattattaaacactcaagaattctgcaagtcagattgttaatccactggcagcctgaaattagtgaaggtagggccaggtgcagtggctcgtgcctataatcttggcattttgggaggccgaggtggggagatcacttgagcgcaggagtttgagaccagcctgggcaatgtggcaagaccccatatctacaatacaaaaattatctgggcatggtggtgtgcacctatagtcccagctactcgagaggctgagatgggaggatcacctgagcctaaggggtcgagactgcagtgagccaattgcaccattgtgccctagcctggacgacagagcaagacttgtctcaaaagaaaaataaaaatttaattaataataataaaaaaattcagtgaaggtagagtatttaaaccacagaaatttaaaaatgctacaaatcagggctcttttttctaggagccagttcatcagcacaccacagtctacataccactgtgcataatcattttaataatggtacacatttaaatagtatatttacttaaatgcagataagaaatgaaaagttttcaatataaagtaattataaaagtttctatttaaaataaatttacttttttttaacttttttttaagttcaggggtacaagtgcaggtttgttatacagataaacccgtgtcttgggagtttgttgtgcagattatttcatcaccaaggtattaagcctagtactcatagttatttttcctgatcctctctgtcctcccaccctccaccctcggaaaggccccagtgtgtgttgttcccctctatgtgtctatgtgttctcatcatttagctcccacttatgagtgagaacatgtggtatttggttttctgttcttatgttagtttgctaaggataatggtctccagctccatccatgcctctgcaaaggacatgatcttgttcttttttatgggtgcatacttaagattttatttaaagaaaatgattaaataaaaatgtgcacaggtagcactcatatatggtaaaattttaaatgtgataggcaggtgagtcaaatttgggaaactgttctaaggcttcagaaatattggactaggtagaatgaaacactgtactcaccagttctagaaaaagccttggctcacattctcattactgactaatattttggattaatctattaaccccacatactcaaggttcatagcataagggtagttgttttcaacagactatatgaagtttcacttccaacctacttttttttgtttgtgagatgcagtcttgctctgtcgcccaggctggagtgcagtggcacggtctcggctcactgcaacctctgactccctgattcaagtgattctcctgcctcagcctcccgagtagctgggattacaggcatgcgccaccacgcccagctaatttttgtatttttagtacagacggggtttcaccatgttggccaggatggtctcaatctcctaaccttgtgatccacccacctcggtctcccaaagtggtaggattataggggtaagccactgtgcccagccccatcctactttctaagagatttctcccctcctcagagccctcaaagagtaaagtggtatcaggaaactgaaaacagaaaatctacttctgctttggttctcatactgctacatgacattgaagctctagcctgcagtggattaggtggtagtggtcctctgggacaggccccttcatttcaccctttagtgtatgtaggcaactaaatctaccacagaggatttccctattttggtggcagcaccttctcaccactaaaactatattatgatatctcattaaatacattagtgagaaaaatgtggaacccaaaaattctacaaattttgaaaatatgaaaatatttttgttaaacctattggaataaagaacagaacagaaatttgaagtaaaaaaattttttttgactgtagacttcttttcatgtgcaatggcagtgctctctgaaggcaaaatagatacttgttcttccattttaccaaggtgtagcctaagagtatagaaattataactacctgattttttggccaggggtggtggctcacgcctgtaatcccagcactttgggagaccaaggcgggtggatcacgaggtcaggagttaaagaccagcctggccaagatggtgaaaccctgtttctactaaaaatccaaaaattagctgggcatggtggcaggcgcctgtaatcccagctactcgggaggctgaggcagagaactgcttgaacccgggaggcagaggttgtagtgagccggatcgtgcgactgcactccagcctaggcgacagagcgagactccgtctcaaacaaacaaacaaaaaaaattatatctacctgattttttacaggaaatatttctttacaagaaagtatcacattaaaaaatcactgtggtgcagacaagctataatgaaaaataattttgtatactattgtggacatctgttcattgactagatagtcaacactagattgcatctgtttctcctttctcccttcctaataagacccaattcttctccagatacccaactttctctccccttaagaagtctctatctgtgaaaccccacctcactgctagccccagggatggttttgcctggcttaagatagacagtacctttcatttcaccagccacaacaatttattcttttggggttgcacatgacctaatacagtctcagttaaaatgagtctcaggattcttgcttggaatgctatgataggtacacacacttgaaggcaatacttgctctctccctcgctctcttatatcccaccaccacctacacccacttttaacaacttttcataactaaggcttcaaattttctagaaattgcacatctctacttttataacttttagtcctaggatctaaaaaaccaattggtaaccttggaacactacagaattgtgttccataaaaaggtggtggcagttgttgaaattagaaaactaacactgttcaatagaacttttaaaatgaaaatgactcacctcggtggaaagtgactggcagagggcggcaaatagctataaaaagaaagtcatataacaacatgaatgaagatgtcatcactgattactatatatagaattctccatgttagctgaaactttttaatactttcttcgcctaacaagacagtaaactgacataataataaaatggcagccttacaaattcaaaagtcttatctttccacaaatctctgatttttatacaaaaaaatggtcgtggcttatcaccaaatgaaaaccatttaatctgacaactataagggcagcattacatctaatacttgtccctctgaggtcattcaataagtactttggtttagtaacataggtagtttgcttctgtcctctttgcatcttccaacttggtggtccatcctcaccaactataatacttttgaagttcttggtgcagtggttaaaggaaccatggtaaatttcccttaaatttctattctatgggaacagtagcggagcctaatctatagcaattgaggagagttaagaaggctttgccacacatacaccccaccccaaacatctaaataactactatttgaaatacttaggttagtataagtgtctgtagctatgaccgcaaagtcagttttgtgatgttgtttttctatattgtgagcataaatacaattatcattagaggcttttacgtcttagatacaaattcttacccataagggacatacacagctctttgtcaatgtgtccatcttcagtcaatgccccaaaaaccaaaccatcagcaccataaagcttggcaagacgaatgtcagccttcatcacctcaatttcacgatctgaatacaaaaaatcacctccccgtggccgaatcatcacaaaaactgggatctgaacactctgcttcactacttgaaggacacctacaagaaaagaaagcagattaaaattcaaatgtgagctaaaagccaatgatatattattggtcatttaccagacaaagatggctctaaaaggtaggacagacactgagaagaaaaatgtatatatggtagaaggtaagtaatagcaaagggttaaatagaacgatttagaaaacagaagatgctacaatttaaaagcacttgtcagttgactcaacaaaaatccttatgactcagaacccttttattggtaggtgacatttgaaagtgcaataactaccaggctcgatgttctgccagtacattattccccaagatccaatttcttctttctaattcattacagctctatttaaaacctactggagagatggttaaatagcttcaaagttcatattcctttaatgggcaaagacatttagcaaaaccttttttttttttttttaaacaagatacgtgaaagggagcaaagttctacttatttgtgattttatgcagagatctatgcataaaagtacctaaatatgccataataagtggctagctcataaaccatcaatagtataaggctgtgacaggccccatcagttgtttacccagtatgaatttctttcttttttcttgctaaaagaactccaattttgcataggatagcagttgtccaatactaagcaatgaatcataattggtgttacaaaaacagactgtactcaaatttacagacatgctctagggattttagaatggccaggaatgccctcttttcatgtgaagattccaaagggctgttgtgtatacaaactttttacattaaataatgctattatcaacctcagagtagcataacttaggagaccacaattcatacacagacttctgcttttggccaagacagggtaacagtgactggatttaccctcccacctataataataataataataaaaaaacagacaaaatatatgaaacagtggtttgcaagacactggacattaagcagtgaagggcaatgatccttgaaaatggtaaacaatgaagttagtaagtcaattctgattgacccaatttactgccttgagagtttctaggccaaagcacagggatgggggacccacatggagccaaaacaattccctgagttaaggagacaaagcttagagttcaggaagactgaagtagctagagtttataggagacagtacagggaggacagaaagataacactggagtagcaaagactatctcaatggtttaaaaaaaggattttttttaaaaaagataggcttggtacggtggctcatgcctgtaatcccagtgctttgggaggctgagatgggtggattgcctgaggcaaggagttcaagaccagtctgggtaaaatggtgagactccatctctaccaaacaaacaaacaaacaaatgtagctggacatggtggcatatgcctgtaatcctagctacttgagaggctgaggcaggacaattgcttgagcccaggagtttgaggctgtagggagctatggtcacaccacttcagtcaagcctggacaacaggtgagaccctgtcaaaagaaaaaaaggaaggaaggaaagcaaagagagagaaaaggagaaggaaagaaaagaaaggaaaggaaggaatgaaagaagaaaggaagacagataactctggaggtctgcagagaacctcctttaatattcagctgagtactgaccggtgcatgcatgcaaagaaactacgcaaggcctgggacagaaccaataaaaaggattagaaataatgtgcctgtcattcataccaagctgtgaataatgcctattccaccagccagacaggaaaatttcaaaattcatggtcacagggtagagttcacagaagaatcctgactcagtagtaaggaataattagctctgtattaaccactgctccagacttgcccagcaaatcttaaaagcaagacccaaaaggaccaaactgttttggaacatttgtaggaattcaaaaatgtctagtaaccaataaagtaaaattcacaatgtcttgcatccaataaaaaattacaaggcaggaaaataagatatattattagatgataaatcaaatgaaacaaacccagaactgatatagatgttagaattcgcagacaaggtcattataacagctatcataactttattccacatgttcaaaaaagttaagagacatcagagacataaaaagactcaaatttctacagatgaagactacaatgtatgagatgaaaacataccaggagagactaatagcagattagatagtgcagaagaaaaggtcagtaagctcaaggacaaaacaatagcaactatgcaaaatgaaaacacagaaaggagattttcttttaaatagagaagttcatcagtgacttttgggacaatttcaagtagtctaatgtaagaatagcttaagtctctaaaggagggagtggagaacaagctgcaagctgaaaattttccaaatgtgatgagaagtataaatgcacaggtccaagaaacatgaaaaaactatactcaggtacaccataagaaaattgttcaaaaccaataataaaaaaatcttaaaagtaggtagaaaaaagagacatattacatagagaaaaacaaagatatggatgatagctttttgtcagaaacaatacaagcaagacgacaatggaaaaacatcttcaaagaaaaaaaaaacctgtcaacctagaattctatacccagcaaaaatacctttcaaaaatgaaggaaaaagctattttagacatataaaagctgaaggaatgaatcactagcatactttttaacaaaaaaagttaaagaaagtacttcaggcagaatgaaaatgaaaccagacagaaatacgggatctacacaaaggaataaagaacaccagaaatggtagttgcatgtgggtaaatatatgatttttttcttattatttaaatctcttatttaacaaaagataattgactcttcaaacaaaactaacaatacagcatggagtttttgatatatgtatgagtaaaatatatgacaacaatagcacaaagaccaggaggggatttcaatatactaaggatgccagcatggaaagattttataaaagcctaatccttgatgttactacagagcagctgaaccggtattaacaattacctacctacctttcaactttttgatgtgagaaagaaatatgtttgatcaaatctttgatttttttacaatcataaacatttctgatacaacatccataacatagttaacatgacattagtaaaggaccccaacgaaactgattatcagttgcttccaggctctatgaactccaatcagaaaacctgggaaaaatggacacttacccatgctgggtgtagttcccccctctgataaaccagaacataattcaatccgatcagcacctgtaatataaaagcattgctcaacacatttttaaaaaataagctgttattaaacagcaacctgtttatatatattttttccaaatatagaacagtcttagaaatcatctcagagaaatcaaattataaagctagagtaaaactctgtttttaactcagctatactctgcagcccacattgtgttactcatactcaaatttaaaaattaattaaagttaagctagttctcttaaatttttgtattatagggttgcctctctatgtacaggaaagtaacatagaataaagatgtttcttaaaactgactatagtggaatactgagtctttgttgataagaaaataacataatatttcccaaaagggtctttattattctaagctttaaaaaacacaaagctacttttgagtagctaaaccaagataatttcaagaataagaaaatgctgaaaccaaaagaattattaggctaccaaggtcacatcaaaagatctcaggaaccagtttgaagaagctctcactagccaaagatagaacattttgttcatcaataagcagaataactacaatggattaaaacacacaaaatatatctaaatctacattcataatgacaaaacaattcaagggaagacagagaacaaattcattattctaaaaagtattataataaataagggaaaataagcaagcatttattctgcctttcttatacaaaccatacttcagcataaccaaacagaggatgagggaaagttctttacagaactattctagttcataagtgaaaaataaatgtcaccattttgcaacccctactaaaatatgggttgctaaatttattaggtgaaaagctgacagaaaaccttaaggatagattaggctggcaatacctgaactccctgttcaatcttaatatcacaaaaacagaaaaaaaccaacatgttatgtcctcctgatgtgatgcaacaggaagtatataatgttatctataaataaattttgtcaaaactgaaatctgaatctgattaggcctctgggctaactacctttataggaaatacagtggtcagaggactatgttaaacgatatcacacatataattagcaaaattgagagtatgggatactctaaaagatgaatatcacagttgcttaacaaataaatcttaagaaagtaaacaaagaattaaagaaaaaagcaggagaaacttacagatttaaagagacttaagaggcatataaaacaaatgaaatgtttggctcttgattcaaagaactgtacacacacacacacacacacacacacacacacacacaccctgtatgagtcaactggagaaatctgaaaactgggttatttgacgatattaagaaatgatttttttaaaggtgtgttagtgacattgtggtgttttgttctttaaaagggaccttatcttaaacaatatacattaataattccacattatttatggatttcttatatatgtatgcatactaggcctttgaaaacaataaagaacttaaacaacaaaaaaagagtccttattttttttttttttgagacggagttttgctcttattgcccaggctggagtgcaatggcgtgatctcggctcacgcaacctccgcctcccaggttcaagcaattctcctgcctcagcttcccgagtagctgggattacaggcatgcactaccacgcccagctaattttgtattttttagtagagacggggtttctccatgttgaggctggtctcgaactcccgacctcaggtgatccgcccgcctcggcctcccaaagtgctgggattacaggtgtgagccaccgcgcccggcaagagtctttattttttagagacacacactgaaatatttaaaattaacatgatgtctgggatttgcttcaaagtaatctgaggttgggagaggaaggtaggactataaatcaggggtcagcaaaccatggcatgtgggctatgggcacatagcttgttttggctatggcctgcaaactaagaatgtttttgtattctttttgaaaaacaacagctttatggacatataattcactaatacaattcacccatttaaaagtgtacaattcagtactctttagtatatacacagagttttgcaaccatctccacaagtaattttagaacattttcatcatccccaaaacaaccctacaccctttagcagtcacctacccttctcatgcctctcagccctaagcaactattaatctactttctgtctacataaacttacctattttggatatatataaatggaatcatatgttgtattttcttccactggtttctttcacttagaataatatttcaagattcatctatattatagcatgtatcagtacttcattcttttctattgccaaagtaagaaggatttttttaactttttttttttttttagacaagatctggctgtgtcacccaggctagagtgcagtggtgtgactggctcacttcagcctctgcctcctggactcaagtgatcctcccaccttagcctcccaagtagctgggactacaggtgctcaccaccacgcttggctaatttttctattttttgttgagacagggttttgccatgttgcctgggctggtgtcgaactcatgagctcaagtgatctggcagcctcagcctctccaattactgggattacaggtgtaagccactgcacccggctgatgtttacattttcaaaagatttaaaaataaaataagtgataaagatcaaatgtgtccagcaaggctgaaaatatatatactatgcagctcttcacagaaaaagtttattgacccctgaaataaatgaaaaactggccatgtgttgaaaatgggtgaagatgagtgatgcatacatggggcttcattatcctatttgctctacttttgtatatgtttatttttccataataaaatttttttttaatttttctgaacctgagatgatggaaatgtctgtgcttcccattaaaacaggttcagagtacaacagaaactttgagggaaaaatagataatgttcaaaagtaaaaaagataaaattcctcatgatgaagtctctgaagtcatctttaagttaatggtttaaaaaaattaaaattttgctaagttcaataaaaaatcaagtcattgagtaagtactattgtcgacacttgacttaaaatgtgacccacttggggagagggagagactagatcataattttccagtagggtttctaattggttgtttctgaaagcattatgagggatgcttagagatcacaagggcttctgagataagcacacaggattaattttcagactcttaaaagggtagccaacggtcattcactatctgatttctcttacctcctctttctgcattcacagctgattccactgaatcaacacaaacttccatgagaaatccatttgctgctcctaaaatacatggagaatggtaagagttcataaaggttctatccatccagaccaatttaccacaaagggtttacattctgctgccaaaatgcaaatgtccaataacaggtaatagataagtacactagggcccatgaatgcaataaaatatcacattaattattgaattgatgcctatagactgaaataggtacacagacagatgtataaaaaattatactgaggaaaatgtctatcgaatgccaaattaatcttcctaaaacatagacctcatcatcacattccagctgagattcttacaatgcttctcaatgcctgcagaatatatttaaacttctttataaggaatataggtttaaaagcaggacagacttcaaatccatgtcccaccaactatttagtgtgagatcctagattagttacttaagttttctataaaacaaggtagattttagtatgtacctcagagtagtgaggattaaattagataattcatgtaaagtatatagtctcaagaatcaaaaagtattagttatctggccgggtgtgatggctcatgcctgtaatcccagcactttgggaggccgaggtgggtggatcacatgaggtcaggaattggagatcagcctggccaacatggtaaaaccctgtctctactaaaaatacaaaaattagccaggcatcgtggcatgcgcctgtaatcccagctacttgggaggctgaggcatgagaatcgcttgaacccaggaggtggaggttgcagtgagccaagattgtgctactgcactccagcctgggtgacagagtgatactctgtctcattccttcttatgcttccagatctctccagtccctaccgctggctccccaatgccttctcctcaacccagagttccttctggcttcatctctgaataaaatttttcaaggaacatttccatgattttttctgtctcccaaagtagaaaattttatgtccctcttttgaactcatttaactcttcatgagttatgaaaccccaattgttccttcttaaaatatgaattactttctaccttttattatttatgcagataaatatctgatcacttctacttgacttagagttcctaagtttgtttttttttttttttttttttttttgatacagagtcttgctctgtcgcccaggctagagtgcagtggcatgatctcggctcactgcaacctccgcctcccaggctcaagcaattcttgtgcctcagcctcctcagtagctgggactacaggtatgtgccacaacacctggttaattttgtattttttgtagagatggggtttcgccatgttgcccatgctggtctcaaactcctgcactcaagcgatctgccagcctcggcctcccaaagtgctgggattataggcatgagccaccacgtctggcctcctaagtaaggtctttatgtgagaaatctttatcatcacccacaccaagcacagtatctaccatggtacacaataatcaaatatttactaaaagctgaataattacaacaaaattaatgtatttatattacaaagtgtgatgtaaacagagttttgagtttttttccgggagcacataatttaaaaaaatgaacgaaacaatgcacacttcatgtaatgacacttactagaatgttcctcacatactggtaatggtcacttctggtggggtgtgatttgaaattatttttattttcttctttttacttttctttattgctttattttttctacccaatattgcttttataatttaaaaaagcaatttttactttgaaaaacaaataaaacaaaaacctatcatctgctaacatcaaactgcaattgccttacttatttaagactatcagtccctgtccggcgcggtggctcacgcctgtaatcccagtactttgggaggccaaggtgggcggatctgaggtcaggattttgagaccagcctggccaacatggcgaaaccccatctctactaaaagtatataaattagccgggcgtggtggcgggcgcctgtaatcccagctattcaggaggctgaggcaggagaattgcttgaacctgggaggtggaggttgcagtgagctgagatcaggccactgcactccagcctgggcgacaagagccagactccgtctcaaaaaaaaaaaaaaaaaaaaaatactatcagtcccaaactgtgaaagggttaagtgtcaatctatgctcttaaccaacagctctgcattattaactccatgagtttcctggtagctaccagaccagctgtcagatcagtggcactggccgatgctgatgctgccgggggactatttgcctcacacaagaaaggaccctaggcaggagaagatggagagatgtataaaaaaggctatgacagaaggcagagcaaggcagttgtcccaagcaacaaagttataggatcaaaggagaagcagcagcagttctcaaagtgtagtagtccagagagctttgggagcctctgagacttttcagagtctgcagggctacaaccgttttcttaataattctaacactttatttgactttttcactttaattctctcacaagtgagaggcgttttcttttttgaggcagagtctcactctgtcacccaagatggagtgcattggcgcgatctcggcttactgcaacctccgtgaagaggcgttttcaagaggctacttgacatgttagactgaatgaagcagcgggcatgagaatccagctgtcttccattaagatatactgaagaaacttgcaaaaatatatttccactcttttgctttttttgttgttgttgtttaggaatatttctttttcaaaaaaatattatgtcaatatgtaatgggtttactatggttattttctaatcaatattttaaaattttgttttaattttatttttatttttttgagacggagtctcgctctgtcgcccagggtggagtgcagtggcgcgatctcggcttactgcaacctccgcctcccgggttcaagtgattctcctgcctcagcctcccgagtaactggtattacaggcgcctgccaccatgcccagctaatttttgtatttttagtagagacggggtttcaccatgctggccaggctggtctcgaactcctgagctcagatgatctgtccccctcggcctcccaaaaaaaaatttgttttaatttctaatacagtcaaaatagatagatgtaatccacataaagaaaaaatctttgaggattcttgataacttttaggaaggttcctcttcacggaggaagagggacttgccaaattctctggcacctgccatgccatgctaccctggcactcaggaagaactcgggtcttggagcagccacaagctcggccacttggtagctgcgtgactttggggaccaagccccgtccccgccgtggcagctacaggtaactgcaggttaggaactgggctccgcgctcgacaattaactatcccagcggagtactggctgctggtgcgggcggtactggcatcctcgtgtggcgacggaaaaaacgtgaagctgaagttaaccaacttgcacaaggtcgcagggccgttatgaggggaccccgggactcgaaccttggctccacagctgagccattctcgctacctgcccctcgtcacgccctccgtttccacacctttaacgcctcaaagatagaaggtgccgcccaaggggctggaaggagctgaggaaacgactccagaagaaatcaccactgactacgactcccgccggcccgccccggggagccttcggccgaccgtcccctcccccgccaccttccgcaccggccttcccggacggtatccgcgctcgttttcgctcagaggaggccccctgccttttcatgctccacgcgttcctccctcgtgcgcctgcagtttccacttggaatttgggctccggcgcgcaccagctaagaagcgcgtcaacagctgcgcgcgcccgtgcgcgcgtccccgacacctacgccccagcagcccccgcgaaagcggag

SEQ ID NO: 778 - DNA, 1112 bp, Homo sapiens
agggtttggtgcaggaacatctgtagtggtgcatggccagggacagccatccccataggctcaacttgctcctataggagtctttagtgctaggggaactgtcagtcctcaactctgcaggatggtcttgcccatcagatgaggcaggtccaacctgagcgccccttggtctgctgacccctcccaggccccattcctgcttgcagggcagcctcaggtgccctggggggcctgcattatagcttctgtactggtagaccatgggtgatcagtggagagtttcagcagggtggtttctgtgggcatgaaccagcctgcatactccctccctatgttgcagtttcccctaacccatggcaacttactcagctggcatgtatctgtgtgggtgagttttgctttcctttgccacaccagtgtgagggagtgcagtccgaccccctccacccaccaactgccattgcaggcagagccttggcagacacagccagccttctccaaccagcagcctgcccttgcactaacactgctgtgggagtcaaactaggcacagagaacagcagatcctccccagccctgagtgacaactcctgcttgcagggcacagagaaggcacccagacctgcacctgccagtaccccacccctgagccaacaccatttctagcatgactgtgcgcacagtcaccagcaggggccccctgcgccctgctccagctgcattcccttcactactctggtgaacacccacatggagacaggcatcctggcacctactagcactctgccacagctgctgctaccactgctgctggcacatgcaaatgaggatggatcctgctgtcattgcactatgaaatgctttcattcacaccacctatcagagtgtagtgaccagcggtctgggaacaccttaggccccccccgaccccagcacagtggatttctaacctcgaggagccagagaacaaagagccaatgcaagtccgccagagttagagcacacagtcctggagttgagagctgagcagtggccctctaacaccttccagaaatgaagccagtctgctgaattcacctataccacagtcaaactcttatggtcatcaaata

SEQ ID NO: 779 - DNA, 284 bp, Homo sapiens
tagaggcaaaagaatgaaaaggaaggaacaaaacctccaagaaatatggaattatgtaaagagaccaaatttatgactcattggtgttcctgaaagagatggggagaatggaaccaacttggaaaacatatttcaggatatcatccatgagaacttccccaacctacctagagaggacaacattcaaattcaaggattgcagagaacccaagtaaaatacttcacaaagaagatcatccccaagatacatactcatcagattctccaaggtcaaaatgaatgaa

SEQ ID NO: 780 - DNA, 1482 bp, Homo sapiens
gtattcactggaagtggatgtaggtcaggccctgttccatcacgtgcacgttaccatggatctcctgcacttgtggtgtgggcagccgctgggcccacggctcctcccactcccgcagaactctgcctttggcttttccagaccctgggccgggtatgagaaccagcttcttggtctgcagccacaaggatgaaggtttggggatgagagaccagcacgggctctgatgagagacaggtgcaggtcccagcttgtggcttgcaggtctcagtcgtacttgctctccctcaccatcctttccaaccgcctggcctgtggtctggtgaagaagaaacagccgaaccgagactttcaccagcccctctaattgctcaaaccgctttcacaatcctctctttctacatcattcctagtggttcttttctgatggaacctctgactggtaacatggcattaccagtcctttccctctcatgttttgctatttcctgatggaacctgggagtctgagtgatttgtatttcaagaagcagttatgctggatctctttgttggttaataccccatgacctatctggccgttatgggatatttcagggataggagttgtgaaagagcccttggctggacgtttctagccttaatctttggcaagccatttcatttccctgagcctcagtttccgccttcctacagcgtgagcaggtctgggtgggctctcaagcccctttcagctctaagattccaagtctgtgattccgatacatcttgactacaatgagcgtgtttaccttttgtctctgagcagtggccctgggtcttggtagtgactaaattccgagctcccaaggtgcagctgcttttcttccttttaattataaattagctgttcattggctgcttctttctagagcctgttttgcttatcttgcaatctgttcatttctgttgatgaacacagtcaaataggcctctatgtgcagtctcctggtttccctggtcaaagtggaaggttggtagaaactggccttcatgtctttgtttccctcaaagttttattcttagtaacgctatatatggttttatagaccacacatatatagtttcctgtgtcttagatgataacatccttaaaatatgaaatatattttgaacctagatacctacccagtattctctgcacagagtaaacatttcattaaatgagtttcaaggactccataccctgatataggagtacattcaagaaatgagtttaggccgggcgcggtggctcacacctgtaatcccagcactttgggaggccgagacgagtggatcacctgaggtcaggagttccagaccagcctgaccaacatggtgaaaccccatctctactaaaaaaaatacagaaattacccgggcatggtggctggtgcctgtaatccccgctacttgggaggccaaggtgggagaatcgcttgaacctgggaggcggaggtt

SEQ ID NO: 781 - DNA, 452 bp, Homo sapiens
aaaaaattaattaattttacattttcaaattcaaaagaataatacaatgaatattcatatttctttcacctagattgacaaaaagtggtatatttaagacatcaccatcattgtctttcttctggagtatacagaacctggttctgaacacagggatatgtttgtagcttcgaggaatgaagggctgtttacagagctacaaaaatagcttaggtgccattatcctcactgcacttaatacaggtgacacatgaaagcacagagtgggtggcagttcaagcctgcgagggccgagcctttccactgctgcagctgttagtggctggcacagggcaggatggcagacctagtgcagcacaaacaaaccacgcagtcagccagctctccagccaactgtgtctacttctaaagtagaagttagacaaaacatggggttcacttagactggggtc

SEQ ID NO: 782 - DNA, 411 bp, Homo sapiens
tggctgggcagagaaggggattcagtcttcacgggaagactccagagaagaggtgatgtgagtgggcactctggaagctgacaagtcatcgtgtctggtgctttccacagaagggtcaggtcccgtggcctggcccaggcccagacggggtcttctgaataccacccctacccgcattccaggagagcatcagtgctgccttctctggggctaccaggcccgctgcgtcaccccgggatcccaggcagcttcacaagctgcccacatccttccccagcccaccactctagccagtagaccagcgctgaggcaggagaagaggggccaggcagaagcagagaaaggctgacagcccgctctgcatccctctctggtctcagaaaccaggagtgagtcacacaaccagctctc

SEQ ID NO: 783 - DNA, 411 bp, Homo sapiens; identical to SEQ ID NO: 782

SEQ ID NO: 784 - DNA, 8640 bp, Homo sapiens
ggagaggggaccagaaagaacaacatggagatcacgtggacggtaagaggccctcccagccccagtggagcagctcaccttgccgcatgcaccgggagcccctctcccttgatgccccgacactacgaggccatgatgtggttcagactctctggctggtcttggtggccattcttctttgagaaaccaagctcctctctgagttgggcatccagaaaccaaacaggacaaatgtctaagtgtaagatttcagagaggagacaggagcagaggggaccagggtccaccgactgccagtctagcaaaacgcatagaggatgcagcaaaatcaagcagacttctcttgaaggaggagggactggggttagactttagaaaagatctaagcacaacaccaaaccaagttctggtgtgtcctagggccctttcactggagatttgtgggagctggggagagaccaacatctgagatgtgtccagtacaggctttcttttggtccaagaatggactaggtcattccaaagactccctctggtcttagaaaatcccatcttcatgctggctcactgactacattttccaaaccaaaactggagtatgtggtctcaaaatgacttttttcccaaaccacttcccagtctgagaatgcaaacgcagccactgaaatattaacatttctgagcttctgccatgagtaatggaaactgggagatgcagtgtttgggatcatgaccttccctgtctttctgaaggctgctcccacagcagccttggccaaacagggcaacggcagctgggctgagcccagattcaggaccctggtctgtggctctgtatagcaggctccaagaggactgattcctgggccaggcccttagaaaataaagagcagaatcacacccatgtttaaagaactctgacctcttgggaaggacaggacagacacacacaaattcggtagaactaaagtccattctggaattttgagttcattagcaggagccatgctgtggttaaccacaactcatttcttctgactttggagaagtttaccttttgtctatattttgctttattggttgctcctgtcacaggaaggagttttgttgaaaataaaacctttgcacctacaaatgcgggtggctctcagagtcagagtaactgggtctcaggcgaagcctctgtcacagaaaatctgcatgctgctgggttcacaggaccttgggcttttgggggactcactggggtgggggatatggtcttccctaccctgcaagggggcaggccagtgttgggcacatctggaagggatgcctggcacagcaagagagggcaagctgtgggtggatctgggcccctctctggcagcctctccagcctgtctgtccctctgcccagcccatgaatgccacctcggcctttggccccaacctgcgctacattgtcaagtggaggcggagagagactcgagaggcctggaacaacgtcacagtgtggggctctcgctacgtggtggggcagaccccagtctacgtgccctatgagatccgagtccaggctgaaaatgacttcgggaagggccctgagccagagtccgtcatcggttactccggagaagattgtgagtagtctcctccccgtccccccatcaggacccttgtggctaggtcgcacgaggccacgctcacaggccaggaaccttggggtgggtatgggaggacagccagttcccaggaaggaaaaatgttctgtagtgacctagagcagacaggcacccagtaatgtcaggagtggaaatatcatccgaacgtagttggaattactgaatgtcatcacccagtccagaattctcatttcacagatgtgaaaactgaggcccaaaaagggaaaaccctcggcagtgttccatagtcatcaatgtcagtcttgagaacagagcccaggtcttccgatcccctggcagtctgccttactgctaagccatactagtaccaagaaaaaacatcaggactacccatcctaaagagctataattagacacttctgtaggaagcagggcagctggccagaggttcccccggggaagccttgagggatcaggaggcctcctcagcaaccagacaggagcaccccagaccagcccctcctggtgctcccgctgcggctcccagccctgggaactgagcacagaaagagaaggtctttgggggctggcccctggtaaaacaacaagattctggtcatatacatggacatatatgcctggcttcccagacggtggtggcctctctgtccccagcacatcaatcctgtaggctgctaaacaaagcaggggtgtcggggagtcccctcctggttgagggcctttgcgccctgttgagtctgggtctgatcggagaagtgatcatgtaggtggatggagtgggcagaaggaagggaggagggacagtcttgagtgggggaacttagaaggagcagtcaagagtacggccagtggcgttcctaacagtgagatggaggaagggagggctgggccctgggccccactttcccagaggtgattatggattggactcacaagggagatgagcagagagggtcagcaggtcctctgtccatcccactcctcacctccatggtggtgggcacttcagacaggagcccgatgggaccactggatggtaagtgcagaaagggtggcatctggtcatggattttatggaccagcccacagtttccattgcacgcttctaccctgcggcccacgctctgatggattagaagggacgaggcagagctgcttttgcggcagagtggagaaaacagggacaagaatcagttatgggggagggaggggccttccctttccaggtagtcgcagggtcagaatcacttcctgaactagattagggcatcttcaacctgtgggtaatgtttcctgccaggaaacagatgcattctcaaaaggaactatttataacgtgtggagagagttggagggaaaacggcaagatacgtgatccaccttaaaggctggcagcagcaggaagccattatgccactctgagcctccatggacggggatagatgagtccacagcaagcaaggaccgcccttaggagccatggccttaggtagaagagtacaaggctgtcaacctgtagcccagcaaagaggaacccaggggaattgatacccacccttcctcttctcctgccctggggcctcctgttggcacctgctattggttaaacccatctggaagcctgagaacaagggaaccccgctgataaggtccagcgagggcagccccccaggagacggagcagggtgaggaagggtggaggacaaaacgaaggggctgatgggaaactacccagcacaggagggggcaaatgagtgccctctgaacatgtaggcagagtctcttccacctagactgccacccttttgtcctgagccttccccaccactttttcaagtactgtctcatggaggagatatggcccctgccctcatggaatgcccagtgttgagtggagtgcaggtacaggccagcagagaacaagtcagaagcaactgtagagtcctgcctgcataaccagctctctgtcccaacacattgcagatcccagggctgcgcccactgaagttaaagtccgagtcatgaacagcacagccatcagccttcagtggaaccgcgtctactccgacacggtccagggccagctcagagagtaccgagtgaggaagccagctccggactcacctaactacccagctcactaaccagggccaggggtagcaaatgcgggctataagatatttgaaagaaaccctagcgttgtttattgaatccagggttgactcaagaagataatgtctagggttagatgttcaaaaatatacccagaaaaaaaaattatatatatatgtgtgtgtgtgtgtatatatatatatgtgtgtgtgtgtatatatatacgcatatatatatatatatatatatatatatacacccagatgtgtccaacagatatgctgagagattctgctcagcagaaaatcacgtgaaaggtggtgggtttgggttggtgttgcatagcacgttgcgtttggaatacatgcgtgagtgggcacacatgtatcttcagagcagtgttgaggcaccgctgagctactcccctcccctctcccaatggcccctactgggctccttatctcctaagccacaactaacaggcaaagccactgaaagcatgcaaatgccctccctgttgtcgcagccaactccagataacccagtatatggactatcaaggctcttggcttctcttggtcctccctgcctgagagcagtttctgctctatcatccatcctcttcaaaagggtgagctcagatgggaagaagagagagagcacccagggtatacacggcgctcccttctgagtagcgctaattaaaagttggctggaaagtgagggaggcagtaactgtgattaatgcacgttctgtggcctcagaggtcatcaggagttggctgatggacagttggaggcagagcaagagaggctagtctcttcccaggaaatgaatttggccagtaggggaaagaaggcaacgtgatgtgtacacttgaatgagctcttccccacagatgacttgcacccttaacctacttgcttagagatttttctggctaaagcttccccatgggtccccctctaagtctggaccccttcctaccttgccacaggcagcctgggagacactggcgtggccaactgacctgtggcttcttacccactgctaattagagacttcttgttgcccaaactcattccactgccccctccaacaccaccatcttccatagctgtcccttcccatccaagctctgctaccatgcagcctggcatcccactgacttggacatgtgactgtctcatccctaaagatcttccaacaatatgaaaagaagtcattttacttcaaaggattaaatcaaccctttctcatattcagacttccgggggtaacttgctacctttcaactgctgcctgccgtcaatctaaaccatactaatccaattcaaggtgatgtggtctttgagcacagagtggagctttccatgcctggacccttggctcactatttttggttctggcacggactccctgagcaacctggtacccaccttggaaatcagtctcatgatggagcagctcagatgtaagtttggccaacttgctcattccccaaagacgtggcatggatcagaaaataattggaaccaaaacccttatttcttgtttaatataaattcatgttcaggagtggctaatgagcggggattaaaaggctgcttcctcagcctggataggactgatgaggtcatttgggacttggaggctgtagcaagcaaaggaaagaccggtcactaccaccaccactaacaactaacccagccctgcctgcctgacccctcaccagcctgcctctgtcccgaaggcctactactggagggagagcagcttgctgaagaacctgtgggtgtctcagaagagacagcaagccagcttccctggtgaccgcctccgtggcgtggtgtcccgcctcttcccctacagtaactacaagctggagatggttgtggtcaatgggagaggtgatgggcctcgcagtgagaccaaggagttcaccaccccggaaggaggtaggtctggcctgcagctcttcagggtggggcaggagaagggtggcacacaccttgggcctggagaaactccagcgtggctcagcatggatggcacaaggtgacttctgcgaggcctccaggagcggatgacctgcaagccgagccactacagccattcccagaccaccatcgccaaggtgacctgccctgcgaggaggttgtatctcaagagaagacctgtgaggtctgctgacataattccagacgggttatgcagactgatccccgaagggcacggcgggcacctgggccaccccaccaccttccgaggcagaaggcagcacgtccatcctgactgcctggaaccatctgatttgtttgccagcacccaacaccttcacggttctccccccacgttctcaagaagccgtcactgaaatagtcggcctgtgtgtgcggtggctctgcagagggatacccaagtatagccccgccttctgcaggcctatggtttcacatggccctggggtcaaaacccctattttttgtttcacataaattcaagttcatgaattaacagatgactgcaaagttcctggttcatctccttgttcttgccagtcttcttttatctgctttgcatctgtttcatcctcctccgtttctcctccctccctctttaattgttattttccccatttttcctcttctcttcctcctgtcctctgttcttccctcttgttctctttatccctgtctttccctccccttggtttggttttcatcattggcctctccccaacactcccaccctcccacctcttccggatgttccaccctggctttctgtctccttacccctgaacccaacattctcagctcagaagcctgggcctgctgcctggacccagtgatgagaatccttatctgaggatagggaactgcagcctctgtacaaaacagctgtaagtggttctctacctaggaatggctctgcccaatttcgaggtatctttgcagaatcagagcctaacatgtgctgaatccagagtagttgctagaagaaaacctgatttacttcttcctctcttaaatagcagagtctgagctatgtttgtcctcagacctgaaggaaatagcatcctggatggggcaatgggctccggtcgtctcacggttctcccaggcttcagtttagcagtgtcgagcatgggggttgtccagaggtcaatgccttcatacttgtgctttgttttttgtgttttcctcatcctccctgccccctccccctcatctcccctgctctctcctccttccccaagtacccagtgcccctaggcgtttccgagtccggcagcccaacctggagacaatcaacctggaatgggatcatcctgagcatccaaatgggatcatgattggatacactctcaaatatgtggcctgtacgttctgcccttccctttctcttagataatctgggaaccagaaaccccattctcaccacttttcctaaggactcaaggtagaaagcctgtgggtgcagatggcattgtggagggatggaggggccaacgaaacagttcccaataggattaggggaggcagatgggactcaatccctgctctcctttcatagttctgcctgcagggagcttctagtctcactgatgagacaaagggacctccagtctaatgaagcagacagccatgcctttagggatcttttgtagtctccaacacgtacagagtctaggagagagagttcctcaagctctggagcttccacctgatggggtagatagtatactcacaggagtccacagtcaggacaccccttgacaagatgtcatttatgataaggcagctgcatgtagagctgcccggtgactgtggggtgacccgaatcaggagcctgggttggaaagaccccacctcaagagctcagcatcaccatgcagggacaggagtgccattacatttgaaacactttaggccttcaaaagtaggtaacgtacctcgttaggaaactcaaagagccaaatgttgtgttgttagcaattttaatagccaactctgtgcttgtatgctgttctgaattgatctctggaccagaccctttcaccctttgaggtccattgaataggcactttacaaaggaggcattaagaatcaaaaggcctagtggcgttgtcctagttctgtttgaaaggaagaaagaaagtgaagagttttgtccttgttgaaagggcttaagaatataaacggaatctttctgaatcagccacataactctgcagtgagctagagacaacaggatcagtgaagaaggattaaccctgggtgtaatcaaagagcccggagggagttcttgccgagtgttctgcctttgaaccaagcctttaagatcaccaggcaggtgccatcatttccctttccagcaaagtcaggaaagtgttcttcctccagcttgcagattatataacccatcaataaatgttgctaaagtttaattccacttacctctctctccccagttaacgggaccaaagtaggaaagcagatagtggaaaacttctctcccaatcagaccaagttcacggtgcaaagaacggaccccgtgtcacgctaccgctttaccctcagcgccaggacgcaggtgggctctggggaagccgtcacagaggagtcaccagcacccccgaatgaaggtaggtgcatggcagcagcccctggggtaaaaggtcccagctaattccgaggcctagagaaacactgagatctgtagctggctgcctgggatggagaggaaatgagacttgcaagtcctcaagccctcggaaggtgagaacccatcttatgtgtgagaggtaggtgctggcattgtatctggagctcagctctccttggaccactgtggtcacacatgggtccccacttg

SEQ ID NO: 785 - DNA, 1780 bp, Homo sapiens
gaggactttaaatatctctttatgaagttccctgcctaacctctttctatttaaaggcaaacaaatttcgaagaggttttgtgttccctctttatgtttctctatgacccagtttagtctaaaaccttagttcattacatatacaacacatagcctttgatccctggtaactggcaggtgttggtgattaataaaccaaggcttcaaagtgaagtatgtgtgtgcagatgacttttggaataacgtgggcatagcatcataccttcctgattgtcttcagcatataaaaattaactgttgtagttaaaattatgtcagtgcagagcttgtggttacttggaatgttctttcagaatagtccatgttgcctattaaacctagttttaaacacattgggcagtcaatttatgcacccaaaatatcaccctcaggtagattgagggcaagataaaatgctgtatgtagctatacaaaggaattcagaaacattactggaaagcaaagcctttgtcagcttgctactgacaaagtagtaaaaagctactaatcagtgttgagtcagatgtcaacagaaaaatacaaatacctatgagagccacagcagtttctcgtttcatagccgattcaatgaatatgattagaaattcactgagctcactcttgcaggtttaaatggaggcctgcataaggactgcaagaggaaatctgggtgggagagaatgtaatctgatcttgcactcataggcaatgctgcaatgcaatcatgtccaatacaagcacagcttcattcataacaggaaacgtcttctttgggaaaatagctctattggtgcccaaactcaggtatgccagtgtatgcaggtggagtcgccctacccctcttccaaacatgtcctgtgagatttttaaaataagatgggatagtacaggggcatgaaaagaattgattccttcacaggatttgaatccagttcaagggagaatgtagaaaattcaaaaccaacatataaggtatcacacaaccaagaaaagtaaaaccattgcaagtttacttgcgttgagtacaaaacagatttaatggtgttctatgtcatagtttaatgctctgggtatttaaatatgttttcaacaggatttgagttgaaagtttgtaatgtgctttgatggaacacctctcaatttctattcaataaacttatgtaattgtccattgacaatataatgataacagtaccattgaactctaaactgtggtttatcttcactactgggaagcaactgtgcatcagtattaaagatatgcagaaacataatattcactaatttgttcatctgcttctgtatattgtttatggaattacatggcaagaactgttctaaagcaacatgtctttccacattattttagaggtgaaattacttttgttttgcttctctataatgtgtacttcaaatgaaacaccatacttttttctaaaaaaagatgttcaatttactaatttttttaaatctcataatttaaaaagcatttgttgtgattttaaagtgttgcaagaaaagggattttgtggccgtgggtagactttttatactttgttatatagatggattttttttaactgtagtttgtttaagtcaccaagcagcatccaaaatcttaatgtgtttcatttgatgttgttagatcagagaagaaattggcataaaatcggttaatagtattgtcaaagaattgtgtattgtgtactcactgggaaaaaataaaatatattcacatttc

SEQ ID NO: 786 - DNA, 1780 bp, Homo sapiens
gaggactttaaatatctctttatgaagttccctgcctaacctctttctatttaaaggcaaacaaatttcgaagaggttttgtgttccctctttatgtttctctatgacccagtttagtctaaaaccttagttcattacatatacaacacatagcctttgatccctggtaactggcaggtgttggtgattaataaaccaaggcttcaaagtgaagtatgtgtgtgcagatgacttttggaataacgtgggcatagcatcataccttcctgattgtcttcagcatataaaaattaactgttgtagttaaaattatgtcagtgcagagcttgtggttacttggaatgttctttcagaatagtccatgttgcctattaaacctagttttaaacacattgggcagtcaatttatgcacccaaaatatcaccctcaggtagattgagggcaagataaaatgctgtatgtagctatacaaaggaattcagaaacattactggaaagcaaagcctttgtcagcttgctactgacaaagtagtaaaaagctactaatcagtgttgagtcagatgtcaacagaaaaatacaaatacctatgagagccacagcagtttctcatttcatagccgattcaatgaatatgattagaaattcactgagctcactcttgcaggtttaaatggaggcctgcataaggactgcaagaggaaatctgggtgggagagaatgtaatctgatcttgcactcataggcaatgctgcaatgcaatcatgtccaatacaagcacagcttcattcataacaggaaacgtcttctttgggaaaatagctctattggtgcccaatctcaggtatgccagtgtatgcaggtggagtcgccctacccctcttccaaacatgtcctgtgagatttttaaaataagatgggatagtacaggggcatgaaaagaattgattccttcacaggatttgaatccagttcaagggagaatgtagaaaattcaaaaccaacatataaggtatcacacaaccaagaaaagtaaaaccattgcaagtttacttgcgttgagtacaaaacagatttaatggtgttctatgtcatagtttaatgctctggatatttaaatatgttttcaacaggatttgagttgaaagtttgtaatgtgctttgatggaacacctctcaatttctattcaataaacttatgtaattgtccattgacaatataatgataacagtaccattgaactctaaactgtggtttatcttcactactgggaagcaactgtgcatcagtattaaagatatgcagaaacataatattcactaatttgttcatctgcttctgtatattgtttatggaattacatggcaagaactgttctaaagcaacatgtctttccacattattttagaggtgaaattacttttgttttgcttctctataatgtgtacttcaaatgaaacaccatacttttttctaaaaaaagatgttcaatttactaatttttttaaatctcataatttaaaaagcatttgttgtgattttaaagtgttgcaagaaaagggattttgtggccgtgggtagactttttatactttgttttatagatggattttttttaactgtagtttgtttaagtcaccaagcagcatccaaaatcttaatgtgtttcatttgatgttgttagatcagagaagaaattggcataaaatcggttaatagtattgtcaaagaattgtgtattgtgtactcactgggaaaaaataaaatatattcacatttc

SEQ ID NO: 787 - DNA, 1780 bp, Homo sapiens
gaggactttaaatatctctttatgaagttccctgcctaacctctttctatttaaaggcaaacaaatttcgaagaggttttgtgttccctctttatgtttctctatgacccagtttagtctaaaaccttagttcattacatatacaacacatagcctttgatccctggtaactggcaggtgttggtgattaataaaccaaggcttcaaagtgaagtatgtgtgtgcagatgacttttggaataacgtgggcatagcatcataccttcctgattgtcttcagcatataaaaattaactgttgtagttaaaattatgtcagtgcagagcttgtggttacttggaatgttctttcagaatagtccatgttgcctattaaacctagttttaaacacattgggcagtcaatttatgcacccaaaatatcaccctcaggtagattgagggcaagataaaatgctgtatgtagctatacaaaggaattcagaaacattactggaaagcaaagcctttgtcagcttgctactgacaaagtagtaaaaagctactaatcagtgttgagtcagatgtcaacagaaaaatacaaatacctatgagagccacagcagtttctcgtttcatagccgattcaatgaatatgattagaaattcactgagctcactcttgcaggtttaaatggaggcctgcataaggactgcaagaggaaatctgggtgggagagaatgtaatctgatcttgcactcataggcaatgctgcaatgcaatcatgtccaatacaagcacagcttcattcataacaggaaacgtcttctttgggaaaatagctctattggtgcccaaactcaggtatgccagtgtatgcaggtggagtcgccctacccctcttccaaacatgtcctgtgagatttttaaaataagatgggatagtacaggggcatgaaaagaattgattccttcacaggatttgaatccagttcaagggagaatgtagaaaattcaaaaccaacatataaggtatcacacaaccaagaaaagtaaaaccattgcaagtttacttgcgttgagtacaaaacagatttaatggtgttctatgtcatagtttaatgctctgggtatttaaatatgttttcaacaggatttgagttgaaagtttgtaatgtgctttgatggaacacctctcaatttctattcaataaacttatgtaattgtccattgacaatataatgataacagtaccattgaactctaaactgtggtttatcttcactactgggaagcaactgtgcatcagtattaaagatatgcagaaacataatattcactaatttgttcatctgcttctgtatattgtttatggaattacatggcaagaactgttctaaagcaacatgtctttccacattattttagaggtgaaattacttttgttttgcttctctataatgtgtacttcaaatgaaacaccatacttttttctaaaaaaagatgttcaatttactaatttttttaaatctcataatttaaaaagcatttgttgtgattttaaagtgttgcaagaaaagggattttgtggccgtgggtagactttttatactttgttttatagatggattttttttaactgtagtttgtttaagtcaccaagcagcatccaaaatcttaatgtgtttcatttgatgttgttagatcagagaagaaattggcataaaatcggttaatagtattgtcaaagaattgtgtattgtgtactcactgggaaaaaataaaatatattcacatttc

SEQ ID NO: 788 - DNA, 1359 bp, Homo sapiens
aaaggattctcctctgtatataatttcttttgtgcattgctatgcaagctcactctttttagctctgctcatattattgtctgttcttattggtctgttgtactatatgtgaattaataggctgtggtgccatatattaacttttaattgtgtaacttttatgtttaaattttgcactgcaattttatttggtgataagcacaaatctctactcctcatgacatgaagaaaaagactgaatgtgaagggagtttctgtactgtaagctagattggataatgatggctgtaacaaatcatgttagatggttttcagttggggtgtagaaataggaagatgcaaaggaacaatggtgttggcaaagtcttctttgaatatcagggactgagtcaataaaaaaaatagtagaaaggtggcttttactattgacaaaagccggggtcaaaaaaagtagtttaagtcttaagactgaatatgcattaaagtatgcaggtagcaaagatgtaataaatttgcttaaaaaaagaaattaaagttttatttagaatcaattttacctgtcattgtaattgacccatctgagaattacaataagcaagaggaaattaaggtgttttgcaagagctgtatttatattacagttttttaaaaacattttctgaattatcgtaattaagctctccaactcgttaagtcagaatataatatgaagttccccaaggaaacgaacaaaatgaactctagaatatctagcaaatagttaaagaagcaatttattattagggcatactcgggctgtttccaaatataaactctattgcaatatcttatttcatctttctaatacatgtacagtgcacactagaggatagagctgcatcacttaaattcatgacttaaaaaataatacagtttatatacaacttgttttttatttgattaagaagtgaagtttacgccacccaatgtatagccaaattgtacgtgcttaaaaaacagtgccgagagtatgttcagttcgcagtaagtagatttattggaataaatattctatggtacattctcagaaattggcttccaactaaaatacgtttgacccattttgaataaggaaattgaaaagaaaaatttaaaaggagaaaaaaatgcatgtttataaactttttaaataaaaccagaccttgtaagtggacattaataattgtcctgcctcatttgttttcacgactttgacaacaagaagttcctgaacattagtcatgtatgctcagaataaatgtgactttgaaatatatgttagctactgtacatgtatagtcagtcaagtagaagaggaccttcctgaaattcccacttgtg

SEQ ID NO: 789 - DNA, 451 bp, Homo sapiens
ggaacaggtggtggggtagtgtgcagatgtggaaatgggcctgcaacggccagatcccttcctttgtcccaggtattgtttggaagcatcatttgtagtgaatgactaatagtgttctgaagcattttctattgttctaagttgtttccatcattctatattattaaaagtattacatagttggctgggcgcggtggctaacgcctgtaatcccagcactttgggaggctgaggagggcagatcatatgaggtcaggagttagagaccagcttggccaacaaggtgaaaccccgtctctactaaaaatacaaaaattagctgggcatggtggtacacgcctctaatctcagctacttaggaggctgaggcaggagaatctcttgaacctggaaggtggaggttgcagtgagctgaaatcaggccactgtactctagcctgggcaacagagt

SEQ ID NO: 790 - DNA, 483 bp, Homo sapiens
tcttgccagaagatactttgagtgtgagtatactgtttctcatcatgttctcctccactaattctagcctccatctgtagtttttgcttgcagtaataatgatttcagcttttgtctagtgtggctttgtatttcaccatctcttctgcatttactaattggaattctttggtccctacttccctatctatttattgaattatttattgaagcttattttaaaagtatggtaatgcgccacgtaatgtttcggtcaacagcagaccacatatacaatggtggtctcatacgattatatcatattttaactgcacttttctgtgttagatgtttagatacacagatacacagtgttgcaatgcctacagtattcagtacagtcacatgctgtacagggttagtgcaggtgtgtagtaagctgtaccatccaggtctgtgtgagtattgtatactctgatgcacgcatggcaacagaatggcctg

SEQ ID NO: 791 - DNA, 357 bp, Homo sapiens
aacttttccctaataattattgccaggatcccttgtatctgtaggatttgcaaaatgctggttttcacattttgtcattttttatgtgaatgtattagctaaaattattatcttatgaaagtcttcccttcgtccactatttggttagcctaaatactgttcataaagaaaggggagggtaaatgcatcgttctcattatttaaaactttttggaatagtgaattggtgccttcaccctccaaaagtgactaagacctcagggtggtttctgagacattttgacgtgaacataatagactttgatagcctatttactcctggcatgataaaatgtcagaggttcatcttgttagttt

SEQ ID NO: 792 - DNA, 114 bp, Homo sapiens
tttgttttgagatggagtcttgctctgttgcccaggctggagtgcagtggcatgatctcggctcactgcaacctctgcctcctgggttcaagcgattctcctgcctcagcctcc

SEQ ID NO: 793 - DNA, 912 bp, Homo sapiens
cccaagtaaacattcattcaagagtgagcacacaacaaatatatttgaacatataccaagaataagagaatctgctcttaaaagatgtactttactcagaaaacaaaaacaaactcagaaggaaggaagtgaatgcataaagcaatggcaagctttaccaaatttaccaacttaatttggtaaattaagtaatttaattaagtaatttagtttaccaacttaatttggtagaaattaagaaagaaatctcttcagtatttcttagttgggagtataggatgaagagatggagacttgcagaagggcaaaagtagagagaaggaataggataaaatacctttgattactctagagaaaagagtctaagcacatatgatatagaaatgcaataaagatgttatttatgaacttaatttggtaaattaaattaattaaattactcaatttggtaaatgaagttgttatatctaaataattagtgcctgtaaagaggaatcttttatatttaaaatgtttagacaggattaaggaatgtgaaggaccttaccttattcaagcagaggctagaaatactgcataactttagaatttgcatgatattcagttaaatagacatgttaaaaatgtaaatgtatctacttaatagaaatgaagctgatacttccaaaccaggagaggaggggaaaagttctgaaagaaaatattcatacggtggaagaaagaaaaataaaatgtaaaaatgataaaatagaagttataaataagatggtaaaaataaattcaaattgtcataaatcacaacaaatgtaatagatttaattgattacacttattctattaaaagatccagaatttcaagttcagctatattgtggttatgagacatatctaaaacaaaacacagaaagtttg

SEQ ID NO: 794 - DNA, 912 bp, Homo sapiens
cccaagtaaacattcattcaagagtgagcacacaacaaatatatttgaacatataccaagaataagagaatctgctcttaaaagatgtactttactcagaaaacaaaaacaaactcagaaggaaggaagtgaatgcataaagcaatggcaagctttaccaaatttaccaacttaatttggtaaattaagtaatttaattaagtaatttagtttaccaacttaatttggtagaaattaagaaagaaatctcttcagtatttcttagttgggagtataggatgaagagatggagacttgcagaagggcaaaagtagagagaaggaataggataaaatacctttgattactctagagaaaagagtctaagcacatatgatatagaaatgcaataaagatgttatttatgaacttaatttggtaaattaaattaattaaattactcaatttggtaaatgaagttgttatatctaaataattagtgcctgtaaagaggaatcttttatatttaaaatgtttagacaggattaaggaatgtgaaggaccttaccttattcaagcagaggctagaaatactgcataactttagaatttgcatgatattcagttaaatagacatgttaaaaatgtaaatgtatctacttaatagaaatgaagctgatacttccaaaccaggagaggagggaaaaagttctgaaagaaaatattcatacggtggaagaaagaaaaataaaatgtaaaaatgataaaatagaagttataaataagatggtaaaaataaattcaaattgtcataaatcacaacaaatgtaatagatttaattgattacacttattctattaaaagatccagaatttcaagttcagctatattgtggttatgagacatatctaaaacaaaacacagaaagtttg

SEQ ID NO: 795 - DNA, 267 bp, Homo sapiens
atcatatttagttcgactaaagagatgtcaggcttctttcagatctggtattctatgatcctgaaaattcagagattctatgaatcacttaatgtgtgttcttctctatgttattgagtattattcaaaattatatgtgttcactaattcaacagatatttcttgaatacctaatatgtgtcagaagctgttctgggtgcttgggatgtttgtgaagaaaatagacaaacattttaagcccttgtgtgctaataccctacagggaga

SEQ ID NO: 796 - DNA, 548 bp, Homo sapiens
aagtaggggtttaaaattttgatatagctaaatttattgatttttctctttatggtttctgtcatacttgagaaggcctttccctaagattacaaaaaatattctctattcttaatactttatggttgtgtttttaatcgtagctctttactacatctagaatgaatgagaaggatgaatagaatgaataggaatcaagtgtgtttaaagagtattgctatttttgatggctgcataatgttttatcacatggatagcaccttcatgtgttgcccattcccttaatgtcagacatttagactgctttaaattttttactcttataaataaaattatactgtatttctagttatttccttaggatagagtcatagaccagaattacaagatcaggaggagactaagaaagtgaggcagttataagcagggacttaaagctgccctgcctgcaattgattcccaactccaccatttggtcactttgtaaccaagtcactggacttccttttgctttggttttctcatctgaagagtagggataataatag

SEQ ID NO: 797 - DNA, 32146 bp, Homo sapiens
aaaaataatgaagaaagacagaggaaaaagcagtattcacttgaacacatcccaaacaaagaaaatttcaaatgtaacaaggaaaaagcctgctaaagctcacaatacagaaataactattgatactcaaaatagctttaaagccctgctcaccttttgaatgttgggaattgaccaggaggtgactgtaactgtaagatggttcttccagtaatgaccattttctttttcaagatgatgattattctccaccgtctaagagaccaaaggccaatgagctaccgcagccaccagtcccggaacccgccaatgctgggaagcggaaagtgagggagttcaacttcggtaagttctcagcgaacgacgtgaccttttccttcatcttctggattctcagtgtgactgataaatgttgcaacatgctctgcagggggaaaatgctttagcgtctattactgcatcataatctcatctttggaaagccaggagcattttgaaaattacattacagacattgtttaaacatagtttggatttaccaaagcataggacattgtcttgtctgatgttaattagtcagctcaagattagtgctaaagacttagtaatttagttatttctcttagctttaaaatctttatttcagaactatttcacctcttggttttctttttttttttttttgctctgtgttactgcagctgctaatctgtgagctctcaatggatgatgtatcctagcaagggactgaatgagatattagcggcaaattatgttgatgattcatattttgaataaatggaatattaagcttgtatacatcttgaaaatagtactttaatattctactgtgtcgtagtcacaatgattggatatgaattgaatttttgtactttttaaatatgtttttgttctttatttttaatttttattattatttttttgagacagagtcttgctctgtcacccaggttggagtgcagaggcacgatctcagctcacagcaacctccgcctcccgggttcaagtgattcttctgcctcagcctcctgagtagctgggattacaggcgcccaccaccatgcccagctaattgttgtatttttagtagagatgggatttcaccatgttggccaggctggaatcgaactcctgacctcaggtgatccgcatgcctcagcctcccaaagtgctgggattacaggcatgagccactgcacttggcctgttctttagcattttaagttgcaactatatatccgtaaagtcttatttccacacaactgagacatgttttaggaagtttgctaaaagacccctggagacctttatcgtggtctcccttttgtcgtgtttcatttgcttgatcttttctgccctcctgcttttcagaaattaaaaggctaaaaagaggtgctaaatgttaaaacttctcgtgtagtctcccatgagactattaaaagtaatggcaaaagccacagttacttttgcaccaacctactaattctaagaaccaccaaaaaggggaaagttcttggaaagcagtaaaatgatatggacagttgggatgtaaaaatgtagaaaatatgtcattgtatgttcagtcatcccaagaccctagtgctgccccgatggtagggacttcttaatgagaattaacttttgctcaattttcagagaaatggaatgctcgcatcactgatctacgtaaacaagttgaagaattgtttgaaaggaaatatggtatgtctaaataggaaaattcctgtaatactttgttcatgagcatttacacaatggcgttactgttcatcatgggggtgatgtggacaagcccagcccagggctgccagtgaaccgtgccacactttcttacacgtctctcattgtaaggtccttagtagtgtctgtctaaatattagaaacagtctttgtttctagattacagtaaagctaaggaaaagttgtatttctgtagttatcagctaacatttcttttaaacttccagcatggatatttgggaatttatttacatatttattacaaagctctggatcttgggggtttcattaaaaattatttttttaactgacagtttctgttaatctactttgttaaatccagtatttgctgagatccccctattgtctctacttttatctttttttttttttttttttttttttttgagacggagtctctgcattgcagtagtacaatctcggctcattgcaacctccgcctcccgggttcaagcaattctcctggctcagtctcccaagcagctgggactacaggtgcccgccaccatgccctgctaatttttgtatttttagtagagacagggtttcaccatgttggccaggcttgtctcaaactcctgacctcaagtgatcctcccgccttggcctcccaaagtgctagcattacaggcgtgagccacccttcccggccactgcttttatcttgatgtataactgagttgatgctagatttcaattccttctttgtccttttactattctgtcctatagccacctttatataatgatcaaagaaattcgcaatttgttattatcatttttattttttataaaatatttaaaatgatttaaaataaaaatcattttatttttatcatatttattatcatctgttatcatttttatttggatgactatttactttgccattaactagcaagcggtaaaattgtatgatatgcagttttaactgaattgctataagtgaaaatttaaatgcaataaaccatattgatggtatttgtgttaacaaacttaaaatgagcattttttcttcatcatgagtaatataacctacccctcaatgaaaatctacaattagagtaaatttgctaatgaattcagtaacttttccatatttttagtggtttacttaaggttctcttagtgtttctcccagtttttaatagcttacaccttttttgcccgtggttttttgttttttgttttgttgttgtttttttttttttgagatagagttttgctcttgttgcctagtctggagtggcacgatcttggctcactgtaacctctgcctcccaggttcaagcaattctcctgtctgagcctcctgagtagttaagattacaggtgcccgccaccatgcccagctaatttttgtatttttagtagagacaaggtttcaccatgttggccaggctggtcttgaactcctaacctcaggtgatccacccacctcggcctcccagagtgctgggattacaggcgtgagccgctgcgcccggcctcatgttttctattggttcattatgaagcaaaaacttcatagcatgtgctacctggaagcactgtaacctagtggtaagatcataggctctggggacacagtgccttgccacgtctcttctcctgtctgagtcttagtatcctcttttgtggtcatgagaactgaagatctatcctggagattgataagatagtaaagtgcttcacgtaatacctggcatacatgtaataaatgcttcctgtgtgtatatatatacacacatatacatatatatgtatatatacatatacacatatacatatatatatatatatacataaacacatatacatatatatataacacagtgaaacccccgtctctactaaaaatacaaaaaattagctgggcgtggtggcgggcacctgtagtcccagctactcgggaggctgaggcaggagaatggcgtgagcccgggaggcagagcttgcagtgaaccgagatcacaccactgcactgcagcctgggagacacagcaagactccatctcaaaaaaataaaaaaaaagttaaagagcactacagattcaatgatttattattcttttctacaaattgtgtttaaatgatatctctttctctttttgtccttatagctcaagccataaaagccaaaggtccggtgacgatcccgtaccctcttttccagtctcatgttgaagatctttatgtagaaggacttcctgaaggaattccttttagaaggccatctacttacggaattcctcgcctggagaggatattacttgcaaaggaaaggattcgttttgtgattaagaagtaagactcttggattcctgttgaactcttgtctcttttctgagtaatacgtcttttttattgttgaccaatattcattcaccactaggttctatgtgatgaagtttgagttattttatgtatttttatcttgcactttttaatttatctgggtccagcattgcatcagtcatgcagtgttggcattcgaagcatgaacagtgcccgcactggattggcatgcaactcacattttctttcacaattttctgctacttttgctaaagaacatagaatccacgccttgtttttaggcctgatatatatatatattttttttttcgagatggagtctcacactggaacccaggcttgagtgcagtgtcgcaatctcagctcactgcaacctctgccttccaggttcaagcgattctcatgcctcagactcccgagtagctgagattacaggcgtgcgccaccatgcctggctaatttttgtatttttagtagagacggtgattcaccatgttggccaggctggtcttgaactcctgacctcagatgatctgccaacctcgccctcataggcctgagatttttaaagcatgcgtgggaatatatgattgtttttatagatgtgcagaggaagatagtcttgaatgcaatatgacattaaaggatcccatttaagatttttgtaatatgcttcaaagacctgtgggttgcaaagttacctctttacttgtgaggatacatgctccatgaagcaccttatgagacaacttgcaattattagtttgctttttactctgtagaaacctcaaattaagatttagttgtgggctgggtgtagtggctcacacctataatcccagcactttgggaggccaaggcggctggatcacccgaggtcaggagttcgagacaagccaggccaacaatggtgaaacactgtctctactaaaaatacaaaaattgaccaggtgtggtggtgggcgcctggaatcccagctacttgggaggctgaggcaggaggattgcttgaacccgggaggtggaggttgcagtgagtcgagactgcgccattgcactccagcctgggaacaagagcaaaactccgtctcaggaaaaaaaaaaaaaagatttagttgtgctcaagcatccagattatcttttcttttcaaaaccagccttactgactaaatgttaaatatgtactagtcgttattagtttgctgaatattacctagtgattattgagtatttattctcacctttcagacatgagcttctgaattcaacacgtgaagatttacagcttgataagccagcttcaggaggtaggtcttcaatctcgaggcagatcagaagattatgtgcaataattatttcacgcttaacattgatttcttctttatgttaccttccacatgaaataatatgtctctaactattaattatgtgccattacaggagaattcatgttgtcaaaattctaataatttctagaagaataaacgcatcttctttttattaacccattgtaaatacttataaatattgcatttatgggtagacagaagtaaaagaacaatatttgttctacttttgatgcaagatttatctggcataatgcattgaacagtttattattgaagtctacacgagtcaatggaacaagcattcattgaatgtccatgatatgcaggacataagaaggtttccttttagagcatggagccatttatatcatctcttaattgttagatgtattttgttttgttttgttttgttttttgagagggagtcttgctctgttgcccaggctggagtgcagtggtgcgatctccgctcactgcaacctcccgcctcctgggttcaagcagttctcctgcctcagcctccctgtagctgggattacaggtgcctgccaccatgcccagctaatttttgtatttttcgtagagacagggtttcactatgttggccaggctgatctcaaactgctgacctcaggtgatctgcccacctcggcctcccagagtgctaggattacaggcatgagccaccgcgcccagcctgttagatgtgttttaaaataaatagaaatataattgattttcttgcttgcttttgctctggagtggagtggagtgaggataaaacagaatggaatcaccctgttgatatttactaagatagaaggactgcagcaagatcatagccctaatcttcctgtagcaagtgttacctgctagctgttcctgaatacactgagttttgctttttcctagctctaatgaatgtttcgttcttcctctttttgtacagtgtcagcattgttttagaaataaatacattctagaatcttaggaataattttattattgtctttttttttttttgagacggaatctcattctgttgcccaggctggagtgcaatggcgcaatctcagctcactgcaaccgctgcctcctgggttcaagcgattctcctgcctcagcctcatgagtagctgggactacaggcgtgcgccatcacgcctggctaatttttgtatttttagtagagatggggtttcaccatgttggccaggctggtctcaaactcctgacctcaagtgacccgcctgcctcggcttcccaaagtgttgggattacaggtgtgagccattgcacctggccacgaatcttagaaataattttggccataggaaaaggaaaagttatacctcttattttatagtaataatgtttaataatcaagttattaaacccattaaattgagaacacttgtattactgttattttgacagtaaaggaagaatggtatgccagaatcactaaattaagaaagatggtggatcagcttttctgcaaaaaatttggtaagtctgttttttttaattaccccttcaactaaaatgtattactgagtaacatttttttaaatgttgttttattttaggaaagtaaatacagtgaataggactcagctttagttttccctggtttttttttgggtttttttttttttttcttgagaaggagtcttgctctgttgcccaggctggagtgcagtggtacgatctcagctcactgcaacctcctcctcccgggttcaagcaattctcctgcctcagcgtcccaagtagctgggattacaggtgcccgccaccacgcctggctaacttttgtatttttagtagagatggggtttcgccatgttggccaggctggtctcaaactcctgaattcaggtgatccacccgcctcagcctcctaaagtgctgggattataggcgtgagccaccgcgcccggcccccattctatgaattatctgtggaaagttatttcctttaaaatggcatgctcgtgaggttgaaggggtaaagaacattgatctggttgccacgcagatgaaagtgtagtcggaaatgtgttaccagtttgccatagccgatggaggagggtaattacggtcctgaacagttagtagcaaaaggctgcttccagatagtatttaggttgtgtcctctattgtccatgatgattttctttctctcttttcttcctaaggatattgaaaaacaaactttaatcttttaaagatctcagagctattaagattgtcttaggaccaggacacttaaatctgcccaaatctggctgttgatgatcggtcatctctacttgtctttgctgtattaagtctattcaatagttaataaatatgtttctagaaagagtttttttcaagtaaaacaaaattgacctgtgcctttctttggattgtactaaaatctgatttcaatacaaatgtagtctcccgaattgctttgatttttgtccagcggaagccttggggagcactgaagccaaggctgtaccgtaccaaaaatttgaggcacacccgaatgatctgtacgtggaaggactgccagaaaacattcctttccgaagtccctcatggtatggaatcccaaggctggaaaaaatcattcaagtgggcaatcgaattaaatttgttattaaaaggtaagatgataatctgtagaaatagtttcagtgtcttccctgagaagaggttaatttgatgaagaagggccttttgtttaccttatgacttatttctattgacaatgaaggcattaatatttagattcacttagtgaacaaatattagtataagcatcagatgtgcaaaattgggtctaacaagaacactgtccttggggccttcatacaaagaaaaatgcactgaaggccgggcgcggcagctcacgcctgtaatcgcagcactttgggaggccaaggcaggtggatcacttgaggtcaggagttcaagactagcctggccaacatgatgaagccccatctctagtaaaaatacaaaaattagctggaagcggtggtgcgagcctgtagtcccagctactcgggaggctgaggttggagaatcacttgaaccctagaggcggaggttgcagtgagccgagatcgtgccactgcactccagcctgggcaacagagcgagactccatctcaaaataattaaaaaaaaaaaaaatagaaaaatgcaacgaagtgttattgagcgtttttaagggagaaggcaaggatggcacacctagctcggtcacttgtgcatccagaagagatggaaggtgtttcaagtgaaggaaatcatatgagtagggggaggaggtggcaaatatgcctgcgtatccacagaactcacccaccgtgtgtggagtgaggactgccacgtgggcgtggtggggttgcatggatcgacttgggtgggcaagtggaggaaggcctgagatcctacgaacacaggcagtcacgaagtggtctcgaggcagatgcctctgaaaataatgtggatccgccctttagaaaggtaattctggcttgattttgaaggataacacaatggttagtttgggtgcggggttaggaacagaaggcctctctccactcattgacgggatgtggaagggtaaaccttccttactgattggggtcatgcctctgtgtgtttgttgggactgagttataagggataggaaacgtttaagatgctacagcgagctgcttctggctgtgctgtgggacagttcatctaagattcagaaacagaattgagctggtttgggggaaaagtgactttcgcctgtttatcttaaatataggatgattttgaaggtctcacccgaatatctgaaaattgccattttcaaaataaactcgtcaccaaaatgatttttttttcactataaaatgaaggcaggatgaaccatatttataactaattggcaatgaacagctgtgtgagaaaggcctgtgagttgcttctaaatgctttattactaatatcaactccgtttctacagaccagaacttctgactcacagtaccactgaagttactcagccaagaacgaatacaccaggtaaactagttgtgaaatccttttttaaaaacacagatcagccaggctcggtggctcacacctgtaatcccagcactttaggaggctgaggcgggcagatcacaaggtcaggagatcaagaccatcctggctaacatggtgaaaccccatgtctactaaaatacaaaaaaattagccgggcctggtggcgggcacctgtagtcccagctactcgggaggctgaggcaggagaatggcatgaacccaggaggcggagcttgcagtgagccgagatcacgccattgtactccagcctgggcagcagagcaagactctctcagaaaaaaaaaaaaaaaaaaagcacagatcaatactttgtaagcttttaaaagttaatcttttaaaattatggaagtcccccttcccctgcctccccaaaaaatcatttgcagaagctcaatccagccactccttgatttatcaatgtgaacacctgcagtgcacagataactcaagctttgaccgtagaccactgctatccatgagaaaggcagtgtgccccacaaatgcaagccacatgtgtaatcgtccacgttctagttcagcctgtaatcattataaagaaatacacagggaagtatttcacggtctttatcccatgttctttatttgacagttggcgcgtctttcatactcacagcatatttcagttccaagtagccacatttcaaacatttcaactgctcggggatagtacctgctatatgcatttagaccttaatgtttattcatatgtatcgtgttcctaaaatggcaaagactgtaactctgacctgcacacaaatatcacagcctaatagggaagatctaagaagtctctgttcaatgaatgatgttattttctttattagagctctaagtgtgcctttatttctttcctatctttttttttttttttttttttttttgagacggagcctcactctgtcatccaggctggagtgcagtggtgcaatctcggctcactggggcctccgcctcccgggttcaagcagctctcccgcctcagcctcccgagtagatgggactacagctgcacgccaccacacctgggctaatttttgtatttttagtagagatggggtttcaccatgtcagtctggctggtcttgaactcctgacctcaggtgatccacctgccctggcctcccaaagtgttgggattataggcatgagccactgcacctgacctctttctttttgtttgccattgtgtaatgtcagaggaagtgaccacactctgtagatcatcagccaccttaggaacttctgttgccaagaaccaataaatgcccataccctgtagtgtgtaaatgcccataccctgtagtgtgaagttttctgttgttagaaataagtgttaggaatcaagtatgaaatttgtgtgtgtactaggtgtatacagattggtgcagttaatcatgctcacgactactaaggtgaacaaatgtttcaagttgggttcctgggtgtgccctaaaatacttctccttcagctctcacagcaccttgtggacatgagtgaaggtcagtcagtgtgccaaatagattttgtgtggattatggcatggaaagtggctgagaaattctgtagcagggtaacaaaattatcttggtccaggagtcctgtagtggagaagataaaagtcaatgcttaactcataggttaacctcagcatgcttttgatttggtcaagcaatcaaagtactggtgaagaattgaagattggaagtgacacattttttgctcagggaagtaatggagaaagaaaaatcttcctggaggtagatcttcagtttggattagtctgaacatgatgaaacctgtagaaaccttcatttctcaagacaaagctcaaattcaaggttgtgaggaatgcagtcaccacttttgttaggggcagttgtgacagtgagtgactgcaaaaactgagaatgcgaagcctctattgtaaaaagaatgtgcaagtgccatagaagtcactgcaaggattgggtgctggagcagtgccggacctgccatcgtcaccagagtgcagcagattcaccagaaggagaatctccactcttgtcgtcactaacagcacttgactttgtcccattcataaaagatcttggaaggaattaaaggtgcttggtggttcctcattccaacaacaccttacttggcctgcccgtggaacatgcgttagtctttggacaggacaactcgagtcacagaccacaagagaaaagaattttgtggccatcagaattgtctgcttaaacacaccacgggtgcacagtgtcctcagcttggtgaaagggagatgtcacacgcgagaaggcagcggagccaggcatgtgatggagtgggaggtggcacctggctctgtgaggaggctgtgaagtcctgcatgggaggagcaaggtgggggaggagggggtgggggtggggcagaagaggaggctgagcagttaatagaggcgctcgaccttagaggaggagagtccgaggtctttattggtagtattcaaatgtggttcatccagagttattttctgtggctgaatggcctactctgaaatccacagggaaaaaacaactcacattcaacccttgagatgctaagttttcttttaaagtaaaggaaatgttataagattttctgaaaccaccaacctttagcgatattgtcagaccttctccaacattttccactgcatttgtcagcaatcagagatgacctccacaccgaggcgaaccctccaccccccgacccgtttcctctttctctctttccctcctttgctcatccagaaacacttcagtcatcctgcattgtctccaagttgacctccctcctcatccgcaccttgtccacacctgaatactctgtccacatcagtgatattctacatgtctttataatagcttttttgtttgtttgtttgtttgttttttaaattttgatgcttaaaaggcaatggttgtcttagggataggaaaacacaccccactgtcactgtgagtgaagctgaataacgtctctaggtcttttaccattgctttcttttttttctgaagtgatttttccttttatgtccattgctttaagccattcgtgaaattgcacagtgatttctggagtggggacagaaggaaggcggtagtaaaagtcattggtgctgtggcccagttggctggaggaggtgcagggcagggcggcctgcgctggggcagctggaggagcacagatgtccccacgggcaggtggatgagttctgagagctggagggccggtacagtgtcctccatggttccagcttgtgggcttgatcaggccgtcacctgcggtggccactgagctggcgatgaactccgtggccttggagtcgccctcggcagagatgatggccgccgtcttctgctgctcagcccttgccaccacagatctggccctctcttcttcctgctgagccacctctttggttccactgcttctgcaaattccttcccgaaggtcagatccaaggtcacagcatccaggaggaacccaaaggttgctgcttgctccgaagttaattgctcacctgtctggagcccagctctccctgcgtgatcagttctccagcgtcagcctgagccgcccccagcttgaggagctccgcagtgatggatggcagcacattcttcattggcttctccagtaattggaagatgcaaggacctggccagcaacaaggcgggaagaggacgcccagtgtgatggtgacaatctttgctcacagtgatgattggtgcataatgtggtcaagagcagcagtcaaaaataattggtttcttttcccatgggatgagaaagtgcgttccttcccctatcacagtgtcctgaatgccatggaattggtcgaagatgacagacagctctctgtgcagcatcacattgtagaaggcagagttccccacacctcctgcagaagctaaggacagggcagacttggcagctgtgtttccatctgctggacccactcacgcctgcgtccactccaaccccccacatgaattccgtccctttatcattgatttctgatgcgaaaagtcactttgattagtgaagtgttgctttatgtagatttttaggcacacatctgttagataaaacgaggattgcctgtagagaaagcaaataaaagcaaagtccctcttgttgaaactggtgtgggagcccttgaacctcatgcagctggcctccctgctctgaccgagttccctgagggacttctccaaggaggaatgtgtgagaagcactgattttgagcactctttcatgtggacaaatttcactttatttacaatgtaaacttaaatttaaattctgtctttctaggctgggcacggtggctcacgcctgtaatcccaacactttgggaggccgaggcgggcagatcacttgaggtcaggcattcaagaccagcttggccaacatggtgaaaccctgtctctactaaaaatataaaaattagccgggcgtggtggcggctacctgtaatcccagctactcgggaggctgaggcaggagaatcgcttgaacccaggaggcggaggttgctgtgaactgagatcacgccactgcactccagcctgggcgtcatagcaagactctttctctaaataaataaattaattctgtctttctgcagtttttctgatatttggcaagtactggaaattattattttccttaagaccccaaattttcacaccaacatggcacatgtatacatatgtaacaaacctgcacgttgtgcacatgtaccctagaacttaaagtatgataaaaaataaataaattaattaatttaaaaaaaagaccccaaatgtttgcttttaacaaaactgaattaagagaatcactgcaggccgggcgcggtggctcacgcctgtaatcccagcactttgggaggccgaggcgggcagatcacgaggtcaggagatcaagaccttcctggctaacaccgtgaaaccccatctctactaaaaatacaaaaagaaattagctgggcatggtggcgggtgcctgtagtcccagctactcaggaggctgaggcaggagaatggcgtgaacctgggaggcgaagcttgcagtgagccgagatcgcgccactgcgctccagcctgggcgacagagcaagactctgtctcaaaaaaataaaacaaaacaaacaaaaaagaatcactgcaaacaagagtactttctagcaaaatccattctgatttgcaacagcactgataaataacatggttattgggtttctttttgttttccagtcaaagaagattggaatgtcagaattaccaagctacggaagcaagtggaagagatttttaatttgaaatttggtaagtaaaagccagtatttatgtctttaataacatatcaacaaagggccatgtctgaatgaagtatagaagttcgggaccagccgggtgcagtggctcacgcctgtaatcgcagcactttgggaggccaaggcgggcggatcgggaggtcaggagatcgagaccatcctggctaacacgatgaaaccccgtctctactaaaaatacaggaaaattagccgggcgtggtggcgggcgcctgtagtcccagctactcgggaggctgaggcaggggaatggcttgaaccccagaggcggagcttgcagtgagccaaaatcgcaccactgcactccagcctgggcgacagagtgagactctgtctcaaaaaaaaaaaaaaaagaaggaaaaaaagttcaggacctaaagaaggaaggtcccagaaactgggtttctgtttctttctaccactacacttgctactgaaaccaagcagatgacttcatttctcttggattccactttctcacgtgtcagaatgggagaggaagggaggtgttgggataagtttcagttccactgtttgtacttctcgtctggctaacacccatgtggcaaataggtttcatcatttgtttcagcttagatttgttgacagcggtttcctggagtgctgtcttgagaacgattctgaggaggctcagcaagaaagagtgtttcagttgattgggtgtgtctgtcatggagaaggaagtaaggagtgggcagtgctagcaaaattcccggggcacttctgtccattatctcaatacctggggttgacatttcctgtctcagatcaggagtcctgactaccctgcctctgaccactcgaactgagtgctgcttagctgtatcgtagacaccgcctgtttgtgaacagacaccctgcttcttgatgataacacaaaggccagcagggtccactgctgtgtggaatggccttcggtcatttctgcccagagcatagaggtcattttcactaataacataactctccttttgattgaaagtgttaaaatgttcctcctaaaagcacttattttttaggctcgttcttcagatttgccccatatcctaagcaaaatgccttcaatatgaagtggatattgcttgaccgtagggagcttgtccatactgtactcgagaatgtagacacaaagaaagaatgtctgtgtcaaatgttatcctccgcaacttaacgttctcttgcactttcagctcaagctcttggactcaccgaggcagtaaaagtaccatatcctgtgtttgaatcaaacccggagttcttgtatgtggaaggcttgccagaggggattcccttccgaagccctacctggtttggaattccacgacttgaaaggatcgtccgcgggagtaataaaatcaagttcgttgttaaaaagtaagttctttttgccactgtagtcgtttctggaatcaaaacaataaaatgacatttctgttaagatgtttttcaagctagaggtgacaggcgtggctgtaagtccttgatggcaaagcctggctgtgagctgcagtccgggtactgtccattgcccctgcccatactcaatcatcttcatccgtgcaaggaaaatagtgacaatcgcctccgcggagtcaccgtgaggccccgtggtgactcgcagtatgcctgagtacttgaatggaagtttaatttgctggtttttatctgctctgttattcctggtcaatcttgagagcgactaaatattgatgattgagtttctttcttttttttgagacggactcttgctctgtcgcccaggcttgagtgcggtggcgcaatctcagctcactgcaacctccgcctcctgggttcgagcaattctcgtgcctcagcctcccgagtagctgggattacagacttgcaccgccacgcctggctaatttttgtatttttagaatagatggagcttcaccgtgttggctaggctggtctggaattcctgacctcaggtgatccacccgcctcagcctcccagaatgctgggattacaggcatgagccaccgtgcacggcctaatgattgattttcttatctacatttctgcagaattttagtggctaaagaaagtacactagtgttttttttttcttttttaatgaaaatagtcacttatttactcttcataaaatggcttaccagtcatgggaaggaaaagtcagggtcttttgtccacaacactaggaattattgtgttacaggatgattctgtgaatgcctttagaaaaaaaaccctgatcacatcacgaccgttttactagctgtgaggccaccactgtgctggctactgtaacacttcttggttttctttctagacctgaactagttatttcctacttgcctcctgggatggctagtaaaataaacactaaaggtaagagacgacgtgtactccgtatcctatttgagcgcattaagacactctttatccgcattccttaaatcatacggaatcggccaatatctctgtggggcttggagttgtttactttgctttctaaggtattttatttaatggaactatttttcttttttttttttaaaaaaacaaaacatttcattggaaatgtcacatttgcaatcccagttcattcatgttttcacagctttgttgagcccctgtggaggattacactacaagtttaattctgcaggtttctttgaaaagaaccaaactgtatgaattttaatactctgctcttataaagcatctccttctgtatttttttttccctacaatatacaaaaggaactctgcttattttacagctttgcagtcccccaaaagaccacgaagtcctgggagtaattcaaaggttcctgaaattgaggtcaccgtggaaggtaagggccagtcctcggtatgtttctgttcattctctagtttactaattatgtcagttcactagctatgtgtttatacaggtttatacagatgacgttaaccaaactagcttttaactgtgaacagctgcctgtgataaagctaaatttctgaatgcttctaattgaaaatttttaaatccttaatagaaaacagataacatggatcacatcataaacttcccccaagaaaagtcctaaaatgcttttcctttatcataacaaataagggtgcagagtcatgtggaatgttttatcttttttttcctcttcatttttttctattgttttaaggaaagaaagtttagggtggtttaaacagcagtgccttgaataaaagtattttctttttcttttttgagacagagtctggctctcttgcccagggtggagtgcagtggcacaatctcggctcactgcagcctccgcctcccgggttcaagtgattctcctgcctcagcctcccaggtagctgggattacaggcgtccaccaccaactccagctaatttttatatctttagtagagacggggttttaccacgttggccaggctggtctcgaacccctgacctcaagtgagccaccacgcccagctggttcttgtcttttcaggctcacagtgttaaaatactgcatacaatactaaagacaatctccaaccaactgtcaagtatggatatttcttccatctcttcataaatgcagaaggaaatcactgcattaggatcattctctacatcccaggtgtcaagtttttaaataagagtttgccgtactggtgttgagtggcgcagaagtccctatttagtcatgtggcacactttcagagagcctgctttctcataagatagccaacaagcatccatggacaacttacacctgattaattatttctgttcaaaaatgccaagaattaaaaatatattgaacccttgactttcctccttccggaagagatcagaggaagatctctcttatatacaagatgccagcctttcctaaagggcagagccaagttcacggggcctgggaggcctgctttaagaatacaaaattagggccaggcgtggaggctcacgcctgtaatcccagcactttgggaggccgaggcaggcggatcacctgaggttgggagatcgagaccagcctgaccaacatggagaaaccccatctctactgaaaatacaaaattatctgggcctggtggcgcatgcctgtaatcccagctactcaggaggctgaggcaagacaatcgcttgaaaccaggaggcagaggttgtggtgagccgagattgcgccattgcactccagcctgggcaacaagagcgaaactttgtctcaaaaaaaaaaaaaaaaaagaagaagaagaagaagagaagaaaaatgggtttctgtagaaatagaaaaatggtttctgtggaactcgccggaatgacaagaatacccatttcaatttgaacctagctttgttttctggcacaggctggacttgaagattgtaacctagagacacttacgtcattaaatgtgtgttgattatcattattttttctgtcttttaggccctaataacaacaatcctcaaacctcagctgttcgaaccccgacccagactaacggttctaacgttcccttcaagccacgagggagagagttttcctttggtaagtaagcgttttatttttctttctttcatagttttaaatagaatacgttcattatgtttcattttaccaggtgaattgttcctattggtgagtcagtatatatcaaaggttaaaggaatagcccgtagagccaggctgcctgagttcagatctgagttcaaatccgatgccacttgggcaggcgaatacaccctgcctcagtttccctttgtgcaaaatggtaataacattactttctttctcatgaggttatggtgaggattataaatactgtcatttaaagtacttagaaccatacctcgcatgtagtagagactataatttgtgggggcattttgggggttttcatttgttttttctttattttagcatttgttcacttatttgtagtcaacataaaagcaatgtactaaaacagtttgcttatgtatcaggatgggagtagttgtcaagtcatatcatggtaaaagattatgcattttttatttcttcttaaagatgcacaaataaggccaggcgcagtggctcacgcctgtaatcccaacactttgggaggccgaggtgggcggatcacctgaggttgggagttcgagaccagcctgaccaacatggagaaaccccgtgtctaccaaaaatacaaaattagccaggcatggtggcgcatgcctgtaatcccagctactcaggaggctgaggcaggagaactgcttgaactcaggaggtggaggttgcagtgagcagagatcgcaccattgccctccagcctgggtaacaagagcgaaactctgtctcaacaaaaaaaaaataagatgcacaaataagatgaaacactcctgcctgtgaatgtgtattgataagtactgtgataagtattgcaatttaactctcttatgttttatatgcagaggcctggaatgccaaaatcacggacctaaaacagaaagttgaaaatctcttcaatgagaaatgtggtaagtctattttgaaaccttcttactgccacgcagggtgccttcatgggagtaggagggagcagagtgggatactgagcgttggagtatccctgtcattggcaacgtgtgggtttttcgggattgaatggcgtcatttcgcccatgttctgtttcgtgtacgcggctgttttgcaggggaagctcttggccttaaacaagctgtgaaggtgccgttcgcgttatttgagtctttcccggaagacttttatgtggaaggcttacctgagggtgtgccattccgaagaccatcgacttttggcattccgaggctggagaagatactcagaaacaaagccaaaattaagttcatcattaaaaagtaaggaaactggatgaagtgggattagcatgagttgattgtgtttgacactgggagatgggtatgtgggtttgtgtttgtggcagggctgaattagctctggagtcagaaaaactgctttttaagctgcactcttgtatatgtttaaaacttctggccaggtgcgatggctcacacctgtaatcccagcactttgggaggccaaagcaggtggattacctgaggtcagaagttcaagaccaacctggccaacatgatgaaacccatctctactaaaagtacaaaaattagctgggcgtggtggcacgtgcctgtaatcccagctacttgggagactgaggcaggagaatcacttgaacccagcaggcagaggttgcaatgagccaagatcgtgccactgcactccagcctgggcagcaagagcaaaactccatctcaaaaacaaaaaaaaaaaaaaaaaagaagaagaaattttccttatgctgctggtagaagggaaggaggactccaccatactagagagataacgacttttggttgctaaatctacacagctatgttgttactatttgatgctgctggaatctgagcagctgtttagtttttcaagtccttttatttctccaacttaatagaatattttcaatttctcctgtttgcttgaacatctgtggattaggctaacataattgaaatagataggaatgggccgggtgcggccataaatcccagcactgtgggaggctaaggcaggcagatcacttgaggtcaggagttcgagaccagcctggccaacatggtgaagccccatctctacttaaaatacaaaaaaaaaaaaaaaaaatagccaggggtggtagctggcacctataatctcagctactcagggaggctgagacaggagaatcacttgaacccaggaggcggaggagatcgtgccattgcactccagcctggatgacagagtaagactctgtctcaaaaaaaattaaaaaaagaaataagaataattggaattttatagtacatgctaatgcacatgaattatttgaaatcaattgaaatgaattttaggtttcatttgcttggtgtcaggcttaattttgagtcacccagggatgctctcaagcaaagctggccacttttttttttttttttttttttttttttgtgagacagaatctcgctctgtacccaagactggagtgcagtggtgtgtgatatcggcttactgcaaattccgcctcctgggttcaagcgattctcctgcctcagcctccaaagtagctgggattacaggcatgtgccaccatgcccagctaatttttgtatttttagtagagaaggggtttcaccatgttggtcaggctagtctcaaacccctgacctcatgatccgcctgcctcggcctcccaaagtgctgggattacaggcgtgagccaccgcgcccggccaatggccaccttttatgcttttggccaggtctgcagaggtttggcagcctctaagccctctgcttctgcttccggagtgagagcctcaagtgctcctgttttcacagcccatcttgtgtttccatgctgcgtttgtggggcgttttctctttgcatcctcaattctggcgctgattcttttcaggatacattctaaccttggaaagaagatgccaataaaaccagtgtaggggaagggcagccaatgagaggcagcaatggatgttaaatttacaattgtggtttgtctttttggctgtggttctttagataagcatgtgatttctgttcttcatgactaagaattgaatttagactttacagagttactggtttgtaaatctttgagttgtttaaattttaatgttagagttttactgtttgatcagcacattttttttctcttttgtctataggcccgaaatgtttgagacggcgattaaggagagcacctcctctaagagccctcccagtgagtgtattttctgtattttcattgctatagaacacacgctcttaggcatgcattgtgcagctgtggtttacaaacattgtttaaagaatagccattgaggccaggcatggtggttcacgcctgtaatcccagcactttgggaggctgaggtgggtggatcacctgaggtcaggagtttgagaccagcctggccaacacggcaaaaccctgtctctactaaaaatataaaaaattagccaggcgtggtggcaggcgcctataatcccagctactcaggaggctgagacagcagaatcacttgaacccgggaggcggaagttgcagtgagccgagatcgcaccactgcactccagcctggacaacagagcaagactcatctcaaaaagaaaaaagaaaacccattcaaagttgtagttcaggctatttcacaatttttagttatttaataattgggtggctctgtgagtgtgtgatgatctcctaagtacccccaggaagagaaaaacagtgaaaggcagcccttcagggggcatcatgtcttcttgaaatgatctaccatggaaagaaagaaccttgaacaggactgagataaaacagtctcagacagcatgattattagagatgttgaccgtgttttctacaaattctgattttaaatgtatattttcaggaaaaataaattcatcacccaatgttaatactactgcatcaggtgttgaagaccttaacatcattcaggtgacaattccaggtatgagttctctgcttccatcagagtttttgggggtctcttcagggcctcttggactttcccaactagagaggtttgctcagctcatccggggactcggatacattacacgttgcctggtgctcctcccagactcctacagcagttgccttccaaatacagttgctctccaaacagcaacggcaagttttggcacttggcatgagctaaatcctgttaaccacccaaatggctagtctgttccttaaaaaaagtctatatgagaccgggcacggtggctcacgcctgtaatcccagcactttgggaggctgaggcaggaggatcgcttgaggtcaggaattcaaaaccagcctagccaacgtggtgaaaccctgactctactaaacatacaagaaaaattagccaggcctggttgtgtgtggctgtaatcccagctacttgggaggctgaggcaggagaagtgcttgaacccgggaggtggaggtcgcagtgagccgagatggggccagtgcactccagccttggtgacagagccatactccatctgggaaaaaaaaaaaatctatataaaacagcagataaaggtctttataacaagaataaatttgtagcatttttagttaggcattattttaaacaatttcaaatttaattagctcaaagtgctcaaatacttaaatcattaaaaaatggaaaatgcttgaaaacattacacagagctcctaaaaattgggattaaaagtgcatcattgagcagcggcttgtacctgtagtctcggctacttgggaggcttaggcaggaggatcgcttgagcccaagagttcaaggccagtctgggcaacatcgtgagataccatctctttaccataaaaaaaaaaaaaagcagtatttaagttttgggttttctctgaactgtttcagatgatgataatgaaagactctcgaaagttgaaaaagctagacagctaagagaacaagtgaatgacctctttagtcggaaatttggtaagttttgcatttgcaaagtacagttgctataagcaaagagatttgttttaataagatcttttcagcagatgatggttggatggttgtaatcctatataaaaggagttaaaatttaaaagtgagttgtttgtgctaaatttatttaataagataccattagtgttacactattgattgtcagtatgaaagttaatgaatttaaggttcaccatctggcagtgtggctcacacttgtaatcccagcactttgggagcccgaggcaggtggatcagttgaggccaggagttcgagaccagcctggccaacatagtgaaaccctgtctctactaaaaaattcaaaaaattagccgggtatggtggtgcacacctgtaatcccagctactcaggaggctgtggcacgagaattgcttgaacctgggaggcagagattgcagtgagctgagatcaagccaccacactccaacctgggtgacagagcaagactctgtctcaaaaaaaaaaaaaatttaaggttcatatttaaatttgtttgaagtgtacaaagaccttagttaacagcagagacagtctttaaaataaatgttgatcttgtgcttttgacaggctgtttaaggcggtgggttaatctgtgctgttgtgctgtttgtctcactgtccctgtaggtgaagctattggtatgggttttcctgtgaaagttccctacaggaaaatcacaattaaccctggctgtgtggtagttgatggcatgcccccgggggtgtccttcaaagcccccagctacctggaaatcagctccatgagaaggatcttagactctgccgagtttatcaaattcacggtcattaggtaagtgagagtttcctgcttagtcacaggagcgaatctggagctcatgaggctgactcttctaaaatgcagccacaggtagtcatcgaatccggcttcctatgctgtgcaatcaacaaatcaaaataacttgtgtcatcattagaatgtcagatgtgcttctacgaactaagctgactcttttaattctttggcaaagggttggcaaactaggactgtttgccaaattcagcctgcctcctatttttagagtcttcctgaaacacagctacacccgtattatccatggctgctttcctgtcacagtgagtaagtagctgggactgagaaggcatggcctccaaagtctaaaatatttactctctagcactttgtagaaaaaccttagctaggcacagtggctaacgcctgtaatcccagcattttgggaggccaaggcaggcagatcacctgaggtcaggagttccagaccagcctggccaacatggtgaaatcccatctctacaaaaataaaacagttagctgggcatgatggcgggtgcctgtaatcccagctactcgggaggctgaggcaggatagtcgcttgaacccaggaggtggaggttgcaatgagccaagatcatgccactgcactccagcctggacgacagagtgagactccatcacaagaaaaaaagaactttgtcaacctctgtcttagggcgccttgtcacaggcttcgggtcagacggattcaaccttgcatcagccatttgttagccaggtcactctgttctttgtctgtaaatgagattgatcgttgttcccactgagagtgtcagctccttcccgtagagcaggcatgatgattgtactcacctctgacaccattgtgagtgccacattccttcccacgtccttgtcactgtaagagatgcccacctgagcaccaaccccaggttatcttcccctttgtcttccagccccccagaaacagctacgactcaacctacccaatcatttcatcatcagattgccactgtctctagttcaggtctcttggaactggcactcagaaatctcataataaatcctcttgaggcttctcatacactcgtcttcttccaatcttctttccctcaaaatctcatattttggttccacttcacccaccgtcattctccatatcactcccaggagttaggcaaaaagccccttccgttcttccgtatgttaaacttagaatcactctgttccctgctctgcgtttctattttttgtttttcctccatttactagtagcttaacactttctaacagtgttcttattattgatacgtatctatctcttccataagcttataaggtcacggataatacttctcattgtagtacgtaaatgacgtgggctagatatgagttgaataaacagttatacctgtaaattcttacagagtgaaaataaattgttatactttacaatttgtttctctctttagaccatttccaggacttgtgattaataaccgtgagtattttgtgaagtgttttgtttttgttttttcctggggtctgacgtgtgtgcgtgtgagtgtgtatacatgcttaacgtatatcacgttacttcacctatgtcagtaaccaggccaaatacttgttttagccctcagtaaaaacaccaggcacttcctagttgtaaaattattcaagcttcttaacttcctatcctcgatgcacttaatcataaaatggtaataatagcaccgattttgggggagtcgttccagtagatggaaagcatctggaacaggtgtcagcaagctcctgccgacgtgtatgcataaagttttattgaaaccaccatcgtgtccatttgtttatggcagaactgagagatggcagcagcaagtgtgtgcctgcaaaacctaaaatatttactaattggctctgcaagaaaagagtttgcatccccctaacctagaacagtgtctagcctctagtatgtgtttagcctacagtatgtgctcagcgaatacaatctatatttattactgcttttatgactgttataattactgtgcttggatttcgttacaaagtaagtcacaatgtgcctgcttctgttagtatttcagcacagtgcctggcacacatggggctctcaaatattgctgagcgagtgaacaaatgtcctttcaattccttaacgttgatgtcattttcaatagtattttgagccaaacttaattttgcgagtgtgttttgttttcttaactttattattaaaaatgtataaaagtgaggccaggcgtggtggctcacgcctgtaatcccagcagtttgggaggctgaggcaggcggatcagttgaggttgggagttggagaccagcccgtccaacatggtgaaagcctgtctctactaaaaatacaaaaatcagctgggtgtggtggcacgtgcctgtaatcccagctactcaggaggctgaggcaggagagttgcttgaatcctagaggtggaggttgcagtgagctgagatcgtgccattgcactccagcctgggcaacaagagcaaaactctgtcccaataaataaataaataaaatgttctcttttgttcctgttcttgtgcggtagtgtggtatagagttttatggtaattactgtgaattagtgattctgagggacatatcagaactctgaggtttgtttccttctcatcttgagggaaacagcaaatgtatgttaaaatgcttttccaagggaacaacacatccttacattatttaaaccaatctgcttcattttcagagctggttgatcagagtgagtcagaaggccccgtgatacaaggtgagcgaggcaggggagggcccggagctactcctgcctgcacagtggcacaatggcgtgcctgcgtgtggctttggctctcagtcacctgccctgaggggactcagttacacagcacacacatgcttctctgtggttttcactcctgggtttgacagctgatcaaaacataaattcaagctgtgggtcctgattgagaactgggggctgcagaccatttgcaccccctatcccagctcaggcctaacatcaggaaccccaggattaatgggtaggatgaaatggcagagcaagagggccgtcactttaacctgactctgccatccatttctaatgtctgccataagtcagtgagcaaaatgttcttcagtagaaatgtacacattgtgctcttaaaaaattccttaaaaaacaagtggaatggcctggtgctgtgtgagtcattgaaagtaatgagactgggcgcggtggctcacgcctgttatcccagcactttggaaggctgagaagggtagatcacttgagatcaggagttcgagaccagcctggccaacatggtgcaaccccgtctctactaagaatacaaaaactagccagacgtggtggcgtgtgccggctactcaggaggctgaggcaggagaaccgcttgagcctgggaggcggaggtcgcagtgagccaagatcgtgccactgcactccagcctgggcaacagaaaggagattctgtctcaaaaaaacaaacatacgaagaaaaacaaaaaaagtaatgaaaagcttttattaaagggagtaaacagaaggataagggagaaagcataactaaggagcttgttttcatggtagagctatgttaagactctgctctttcaaacttcagttgcatatgtgaacttaggaccacatttgaaaaacagaaatttgaaagtacacttggataatcgtgtgctccatctcaagaccgtgagcattgtttcatcatgcacctgtgtttgtacagagtctagagggcttttctcctcttcctcctcctgggttctttacatagtataaagcagctgttgaacaatgtggaaatcagtctctgtgtttctctttagaatcagctgaaccaagccagttggaagttccagccacagaaggtaaaagggtggggtggtcctgcaagtccttaagacttcttctttcttcttcttcttttttttttttttaaagacagagacttgctctgtcacccagggtggagtgaggttgcgcgatctctgcaacctccgcctcccgggctcaagcagttctcctgcctcagcctcccgagtagctgggattacaggcctgcaccaccatgcttggctaatttttgtatttttagtagaaacggggtttcaccatgttggccaggctagtctcagacttctgacctcaagtgatccgccagccttggcctccaaagtgctcggattacaggcgcgagccaccttgcccagccaagacttttttatcaggacaaaggattgtgcatttaaactatttcactagaactgggtggtggttttgctctctttcttctgggtgaattggatttgcaggttatgctgttgagtgatgacgcatagctgcttttgctccatttcccccagatgacttggtaaattctccgtgaatgactctgctacataacctagataacctaacgtgtgtcctttaaatgcatgtaagccagaagatgtatgttactttgaaaacataagtaacaaaattttgaatgtattgctaaagagatgtctctctgaagctcttttgatgtttggtgtcttgtccttcttattaaaccatatcttagtaaatagtttggtacgaatggatttatcactgagcaggtctgcaaaataattaatcggtaccgttttgtttctgttgatagaaataaaagagactgatggaagctctcagatcaagcaagaaccagaccccacgtggtagacctcttccctcctagggtaaatcagcttctgtgtcagggatgctgtgtggtgtccatctgaaccccctgcatacgcgtagctaatgtgatctccccactttcacataagatggtggccctaccttcagggaatgtgggagccaggtgggagccttcccggatatttaagctagaagattctacagggagattctccttggatcaatatatgtctctcagtcaaagatgtaaaagcacttttgccttaaaaagaatgttctgtttctaaatagagtcaacgttgtcctcctcattggaattcactatgagtcagaatcattagactgacttttttttttccatagtaatagtattttgcagagtctcacagagctgcagatcttttgttcatcttgcagagttaacaagtctgatcctgttagtccagatttcttaaatttggccaagttataataggagcagtagcttgagacccgaagtcaggaaactttgacaatggatttttttttttaatccagagacttgtactggaatttgccttaccctgtcagctcatggacttaaggtttcatcccgctttatgagtgcttctgaatccaagtcattgttacctgaatttgcaaattaagttgtgatattcgtgactgttaaattcctgtaattagattaacctctttgcttgcttgtttgttttctctcctattttagcttaaagtatcagtggttgagaagagcttttcggacctgttactaccccaagctgtgtaatatacttgtataacagaaataccttctatacaaacctttttttctacttttagatagaaatgtctactttttcagcagttctgtgaattaaagagcagagtgactgtgggtctggaatggctggtgtacttgggaatgtactatcaggattttacagcaatgctgggaaatgacagggaaaatgacaggaatgaatctcaccagattttttatgtactcagcagagccttgagttacggtgtttattttccaatcaagtgaagatatctcctacttctcctactggaacatctcagcttctgcagtgaagaaaaattcctgtgatagttcagttctttagtttttctatttgaaaaaaaaaaatcatttaaatgatcctttgttcacggctctccttaatgactgagtgaacagttcctatctgtatatttgactaaaccttttcctaagctatctctcatggttcctatgtttttttatcataattaaaagcaaaaccatctggatcacctaacagtcagaggtcagtatctcagcgtgtgaattatagaggaaatacagagagaacctcttccacttttacttttcgtccaaataaaatgcatggtgtaccagaagttgaagatcgggttgaggattggggctagctcgatgacactaaggccccaacatcgcgggacctgctgtggcgcggattcttaggaacgctgttctagccggccccctctccaggggtcgccgtggccggcattatttcctagttcttcttgtaaccctgaggtgccagcgcggggagtgaggaggggtcagggggctaaggatgcaacctctgacgttctgcgccttcctaggagagtcttacatgtgttgagatttcacaagcaatgcgagttgtaaaataccagctctacaagaagctaggctctgtgacggcatagttttcagtagctttatcacaatattcacaatggagaattatatgacatggtagcagaaataggcccttttatgtgttgcttctattttacctcaaattgtagatatagggtaatcaataaaatccatccatgcctttcacacactaag

SEQ ID NO: 798 - DNA, 17498 bp, Homo sapiens
ggcgggtgcctgtagtcccagctactcaggaggctgaggcaggagaatggcgtgaacctgggaggcgaagcttgcagtgagccgagatcgcgccactgcgctccagcctgggcgacagagcaagactctgtctcaaaaaaataaaacaaaacaaacaaaaaagaatcactgcaaacaagagtactttctagcaaaatccattctgatttgcaacagcactgataaataacatggttattgggtttctttttgttttccagtcaaagaagattggaatgtcagaattaccaagctacggaagcaagtggaagagatttttaatttgaaatttggtaagtaaaagccagtatttatgtctttaataacatatcaacaaagggccatgtctgaatgaagtatagaagttcgggaccagccgggtgcagtggctcacgcctgtaatcgcagcactttgggaggccaaggcgggcggatcgggaggtcaggagatcgagaccatcctggctaacacgatgaaaccccgtctctactaaaaatacaggaaaattagccgggcgtggtggcgggcgcctgtagtcccagctactcgggaggctgaggcaggggaatggcttgaaccccagaggcggagcttgcagtgagccaaaatcgcaccactgcactccagcctgggcgacagagtgagactctgtctcaaaaaaaaaaaaaaaaagaaggaaaaaaagttcaggacctaaagaaggaaggtcccagaaactgggtttctgtttctttctaccactacacttgctactgaaaccaagcagatgacttcatttctcttggattccactttctcacgtgtcagaatgggagaggaagggaggtgttgggataagtttcagttccactgtttgtacttctcgtctggctaacacccatgtggcaaataggtttcatcatttgtttcagcttagatttgttgacagcggtttcctggagtgctgtcttgagaacgattctgaggaggctcagcaagaaagagtgtttcagttgattgggtgtgtctgtcatggagaaggaagtaaggagtgggcagtgctagcaaaattcccggggcacttctgtccattatctcaatacctggggttgacatttcctgtctcagatcaggagtcctgactaccctgcctctgaccactcgaactgagtgctgcttagctgtatcgtagacaccgcctgtttgtgaacagacaccctgcttcttgatgataacacaaaggccagcagggtccactgctgtgtggaatggccttcggtcatttctgcccagagcatagaggtcattttcactaataacataactctccttttgattgaaagtgttaaaatgttcctcctaaaagcacttattttttaggctcgttcttcagatttgccccatatcctaagcaaaatgccttcaatatgaagtggatattgcttgaccgtagggagcttgtccatactgtactcgagaatgtagacacaaagaaagaatgtctgtgtcaaatgttatcctccgcaacttaacgttctcttgcactttcagctcaagctcttggactcaccgaggcagtaaaagtaccatatcctgtgtttgaatcaaacccggagttcttgtatgtggaaggcttgccagaggggattcccttccgaagccctacctggtttggaattccacgacttgaaaggatcgtccgcgggagtaataaaatcaagttcgttgttaaaaagtaagttctttttgccactgtagtcgtttctggaatcaaaacaataaaatgacatttctgttaagatgtttttcaagctagaggtgacaggcgtggctgtaagtccttgatggcaaagcctggctgtgagctgcagtccgggtactgtccattgcccctgcccatactcaatcatcttcatccgtgcaaggaaaatagtgacaatcgcctccgcggagtcaccgtgaggccccgtggtgactcgcagtatgcctgagtacttgaatggaagtttaatttgctggtttttatctgctctgttattcctggtcaatcttgagagcgactaaatattgatgattgagtttctttcttttttttgagacggactcttgctctgtcgcccaggcttgagtgcggtggcgcaatctcagctcactgcaacctccgcctcctgggttcgagcaattctcgtgcctcagcctcccgagtagctgggattacagacttgcaccgccacgcctggctaatttttgtatttttagaatagatggagcttcaccgtgttggctaggctggtctggaattcctgacctcaggtgatccacccgcctcagcctcccagaatgctgggattacaggcatgagccaccgtgcacggcctaatgattgattttcttatctacatttctgcagaattttagtggctaaagaaagtacactagtgttttttttttcttttttaatgaaaatagtcacttatttactcttcataaaatggcttaccagtcatgggaaggaaaagtcagggtcttttgtccacaacactaggaattattgtgttacaggatgattctgtgaatgcctttagaaaaaaaaccctgatcacatcacgaccgttttactagctgtgaggccaccactgtgctggctactgtaacacttcttggttttctttctagacctgaactagttatttcctacttgcctcctgggatggctagtaaaataaacactaaaggtaagagacgacgtgtactccgtatcctatttgagcgcattaagacactctttatccgcattccttaaatcatacggaatcggccaatatctctgtggggcttggagttgtttactttgctttctaaggtattttatttaatggaactatttttctttttttttttaaaaaaaacaaaacatttcattggaaatgtcacatttgcaatcccagttcattcatgttttcacagctttgttgagcccctgtggaggattacactacaagtttaattctgcaggtttctttgaaaagaaccaaactgtatgaattttaatactctgctcttataaagcatctccttctgtattttttttcccctacaatatacaaaaggaactctgcttattttacagctttgcagtcccccaaaagaccacgaagtcctgggagtaattcaaaggttcctgaaattgaggtcaccgtggaaggtaagggccagtcctcggtatgtttctgttcattctctagtttactaattatgtcagttcactagctatgtgtttatacaggtttatacagatgacgttaaccaaactagcttttaactgtgaacagctgcctgtgataaagctaaatttctgaatgcttctaattgaaaatttttaaatccttaatagaaaacagataacatggatcacatcataaacttcccccaagaaaagtcctaaaatgcttttcctttatcataacaaataagggtgcagagtcatgtggaatgttttatcttttttttcctcttcatttttttctattcttttaaggaaagaaagtttagggtggtttaaacagcagtgccttgaataaaagtattttctttttcttttttgagacagagtctggctctcttgcccagggtggagtgcagtggcacaatctcggctcactgcagcctccgcctcccgggttcaagtgattctcctgcctcagcctcccaggtagctgggattacaggcgtccaccaccaactccagctaatttttatatctttagtagagacggggttttaccacgttggccaggctggtctcgaacccctgacctcaagtgagccaccacgcccagctggttcttgtcttttcaggctcacagtgttaaaatactgcatacaatactaaagacaatctccaaccaactgtcaagtatggatatttcttccatctcttcataaatgcagaaggaaatcactgcattaggatcattctctacatcccaggtgtcaagtttttaaataagagtttgccgtactggtgttgagtggcgcagaagtccctatttagtcatgtggcacactttcagagagcctgctttctcataagatagccaacaggcatccatggacaacttacacctgattaattatttctgttcaaaaatgccaagaattaaaaatatattgaacccttgactttcctccttccggaagagatcagaggaagatctctcttatatacaagatgccagcctttcctaaagggcagagccaagttcacggggcctgggaggcctgctttaagaatacaaaattagggccaggcgtggaggctcacgcctgtaatcccagcactttgggaggccgaggcaggcggatcacctgaggttgggagatcgagaccagcctgaccaacatggagaaaccccatctctactgaaaatacaaaattatctgggcctggtggcgcatgcctgtaatcccagctactcaggaggctgaggcaagacaatcgcttgaaaccaggaggcagaggttgtggtgagccgagattgcgccattgcactccagcctgggcaacaagagcgaaactttgtctcaaaaaaaaaaaaaaaaagaagaagaagaagaagagaagaaaaatgggtttctgtagaaatagaaaaatggtttctgtggaactcgccggaatgacaagaatacccatttcaatttgaacctagctttgttttctggcacaggctggacttgaagattgtaacctagagacacttacgtcattaaatgtgtgttgattatcattattttttctgtcttttaggccctaataacaacaatcctcaaacctcagctgttcgaaccccgacccagactaacggttctaacgttcccttcaagccacgagggagagagttttcctttggtaagtaagcgttttatttttctttctttcatagttttaaatagaatacgttcattatgtttcattttaccaggtgaattgttcctattggtgagtcagtatatatcaaaggttaaaggaatagcccgtagagccaggctgcctgagttcagatctgagttcaaatccgatgccacttgggcaggcgaatacaccctgcctcagtttccctttgtgcaaaatggtaataacattactttctttctcatgaggttatggtgaggattataaatactgtcatttaaagtacttagaaccatacctcgcatgtagtagagactataatttgtgggggcattttgggggttttcatttgttttttctttattttagcatttgttcacttatttgtagtcaacataaaagcaatgtactaaaacagtttgcttatgtatcaggatgggagtagttgtcaagtcatatcatggtaaaagattatgcattttttatttcttcttaaagatgcacaaataaggccaggcgcagtggctcacgcctgtaatcccaacactttgggaggccgaggtgggcggatcacctgaggttgggagtttgagaccagcctgaccaacatggagaaaccccgtgtctaccaaaaatacaaaattagccaggcatggtggcgcatgcctgtaatcccagctactcaggaggctgaggcaggagaactgcttgaactcaggaggtggaggttgcagtgagcagagatcgcaccattgccctccagcctgggtaacaagagcgaaactctgtctcaacaaaaaaaaaataagatgcacaaataagatgaaacactcctgcctgtgaatgtgtattgataagtactgtgataagtattgcaatttaactctcttatgttttatatgcagaggcctggaatgccaaaatcacggacctaaaacagaaagttgaaaatctcttcaatgagaaatgtggtaagtctattttgaaaccttcttactgccacgcagggtgccttcatgggagtaggagggagcagagtgggatactgagcgttggagtatccctgtcattggcaacgtgtgggtttttcgggattgaatggcgtcatttcgcccatgttctgtttcgtgtacgcggctgttttgcaggggaagctcttggccttaaacaagctgtgaaggtgccgttcgcgttatttgagtctttcccggaagacttttatgtggaaggcttacctgagggtgtgccattccgaagaccatcgacttttggcattccgaggctggagaagatactcagaaacaaagccaaaattaagttcatcattaaaaagtaaggaaactggatgaagtgggattagcatgagttgattgtgtttgacactgggagatgggtatgtgggtttgtgtttgtggcagggctgaattagctctggagtcagaaaaactgctttttaagctgcactcttgtatatgtttaaaacttctggccaggtgcgatggctcacacctgtaatcccagcactttgggaggccaaagcaggtggattacctgaggtcagaagttcaagaccaacctggccaacatgatgaaacccatctctactaaaagtacaaaaattagctgggcgtggtggcacgtgcctgtaatcccagctacttgggagactgaggcaggagaatcacttgaacccagcaggcagaggttgcaatgagccaagatcgtgccactgcactccagcctgggcagcaagagcaaaactccatctcaaaaacaaaaaaaaaaaaaaaaaagaagaagaaattttccttatgctgctggtagaagggaaggaggactccaccatactagagagataacgacttttggttgctaaatctacacagctatgttgttactatttgatgctgctggaatctgagcagctgtttagtttttcaagtccttttatttctccaacttaatagaatattttcaatttctcctgtttgcttgaacatctgtggattaggctaacataattgaaatagataggaatgggccgggtgcggccataaatcccagcactgtgggaggctaaggcaggcagatcacttgaggtcaggagttcgagaccagcctggccaacatggtgaagccccatctctacttaaaatacaaaaaaaaaaaaaaaaaaatagccaggggtggtagctggcacctataatctcagctactcagggaggctgagacaggagaatcacttgaacccaggaggcggaggagatcgtgccattgcactccagcctggatgacagagtaagactctgtctcaaaaaaaattaaaaaaagaaataagaataattggaattttatagtacatgctaatgcacatgaattatttgaaatcaattgaaatgaattttaggtttcatttgcttggtgtcaggcttaattttgagtcacccagggatgctctcaagcaaagctggccacttttttttttttttttttttttttttgtgagacagaatctcgctctgtacccaagactggagtgcagtggtgtgtgatatcggcttactgcaaattccgcctcctgggttcaagcgattctcctgcctcagcctccaaagtagctgggattacaggcatgtgccaccatgcccagctaatttttgtatttttagtagagaaggggtttcaccatgttggtcaggctagtctcaaacccctgacctcatgatccgcctgcctcggcctcccaaagtgctgggattacaggcgtgagccaccgcgcccggccgccaccttttatgcttttggccaggtctgcagaggtttggcagcctctaagccctctgcttctgcttccggagtgagagcctcaagtgctcctgttttcacagcccatcttgtgtttccatgctgcgtttgtggggcgttttctctttccatcctcaattctggcgctgattcttttcaggatacattctaaccttggaaagaagatgccaataaaaccagtgtaggggaagggcagccaatgagaggcagcaatggatgttaaatttacaattgtggtttgtctttttggctgtggttctttagataagcatgtgatttctgttcttcatgactaagaattgaatttagactttacagagttactggtttgtaaatctttgagttgtttaaattttaatgttagagttttactgtttgatcagcacattttttttctcttttgtctataggcccgaaatgtttgagacggcgattaaggagagcacctcctctaagagccctcccagtgagtgtattttctgtattttcattgctatagaacacacgctcttaggcatgcattgtgcagctgtggtttacaaacattgtttaaagaatagccattgaggccaggcatggtggttcacgcctgtaatcccagcactttgggaggctgaggtgggtggatcacctgaggtcaggagtttgagaccagcctggccaacacggcaaaaccctgtctctactaaaaatataaaaaattagccaggcgtggtggcaggcgcctataatcccagctactcaggaggctgagacagcagaatcacttgaacccgggaggcggaagttgcagtgagccgagatcgcaccactgcactccagcctggacaacagagcaagactcatctcaaaaagaaaaaagaaaacccattcaaagttgtagttcaggctatttcacaatttttagttatttaataattgggtggctctgtgagtgtgtgatgatctcctaagtacccccaggaagagaaaaacagtgaaaggcagcccttcagggggcatcatgtcttcttgaaatgatctaccatggaaagaaagaaccttgaacaggactgagataaaacagtctcagacagcatgattattagagatgttgaccgtgttttctacaaattctgattttaaatgtatattttcaggaaaaataaattcatcacccaatgttaatactactgcatcaggtgttgaagaccttaacatcattcaggtgacaattccaggtatgatttctctgcttccatcagagtttttgggggtctcttcagggcctcttggactttcccaactagagaggtttgctcagctcatccggggactcggatacattacacgttgcctggtgctcctcccagactcctacagcagttgccttccaaatacagttgctctccaaacagcaacggcaagttttggcacttggcatgagctaaatcctgttaaccacccaaatggctagtctgttccttaaaaaaagtctatatgagaccgggcacggtggctcacgcctgtaatcccagcactttgggaggctgaggcaggaggatcgcttgaggtcaggaattcaaaaccagcctagccaacgtggtgaaaccctgactctactaaacatacaagaaaaattagccaggcctggttgtgtgtggctgtaatcccagctacttgggaggctgaggcaggagaagtgcttgaacccgggaggtggaggtcgcagtgagccgagatggggccagtgcactccagccttggtgacagagccatactccatctgggaaaaaaaaaaaatctatataaaacagcaggtaaaggtctttataacaagaataaatttgtagcatttttagttaggcattattttaaacaatttcaaatttaattagctcaaagtgctcaaatacttaaatcattaaaaaatggaaaatgcttgaaaacattacacagagctcctaaaaattgggattaaaagtgcatcattgagcagcggcttgtacctgtagtctcggctacttgggaggcttaggcaggaggatcgcttgagcccaagagttcaaggccagtctgggcaacatcgtgagataccatctctttaccataaaaaaaaaaaaaagcagtatttaagttttgggttttctctgaactgtttcagatgatgataatgaaagactctcgaaagttgaaaaagctagacagctaagagaacaagtgaatgacctctttagtcggaaatttggtaagttttgcatttgcaaagtacagttgctataagcaaagagatttgttttaataagatcttttcagcagatgatggttggatggttgtaatcctatataaaaggagttaaaatttaaaagtgagttgtttgtgctaaatttatttaataagataccattagtgttacactattgattgtcagtatgaaagttaatgaatttaaggttcaccatctggcagtgtggctcacacttgtaatcccagcactttgggagcccgaggcaggtggatcagttgaggccaggagttcgagaccagcctggccaacatagtgaaaccctgtctctactaaaaaattcaaaaaattagccgggtatggtggtgcacacctgtaatcccagctactcaggaggctgtggcacgagaattgcttgaacctgggaggcagagattgcagtgagctgagatcaagccaccacactccaacctgggtgacagagcaagactctgtctcaaaaaaaaaaaaaatttaaggttcatatttaaatttgtttgaagtgtacaaagaccttagttaacagcagagacagtctttaaaataaatgttgatcttgtgcttttgacaggctgtttaaggcggtgggttaatctgtgctgttgtgctgtttgtctcactgtccctgtaggtgaagctattggtatgggttttcctgtgaaagttccctacaggaaaatcacaattaaccctggctgtgtggtggttgatggcatgcccccgggggtgtccttcaaagcccccagctacctggaaatcagctccatgagaaggatcttagactctgccgagtttatcaaattcacggtcattaggtaagtgagagtttcctgcttagtcacaggagcgaatctggagctcatgaggctgactcttctaaaatgcagccacaggtagtcatcgaatccggcttcctatgctgtgcaatcaacaaatcaaaataacttgtgtcatcattagaatgtcagatgtgcttctacgaactaagctgactcttttaattctttggcaaagggttggcaaactaggactgtttgccaaattcaggctgcctcctatttttagagtcttcctgaaacacagctacacccgtattatccatggctgctttcctgtcacagtgagtaagtagctgggactgagaaggcatggcctccaaagtctaaaatatttactctctagcactttgtagaaaaaccttagctaggcacagtggctaacgcctgtaatcccagcattttgggaggccaaggcaggcagatcacctgaggtcaggagttccagaccagcctggccaacatggtgaaatcccatctctacaaaaataaaacagttagctgggcatgatggcgggtgcctgtaatcccagctactcgggaggctgaggcaggatagtcgcttgaacccaggaggtggaggttgcaatgagccaagatcatgccactgcactccagcctggacgacagagtgagactccatcacaagaaaaaaagaactttgtcaacctctgtcttagggcgccttgtcacaggcttcgggtcagacggattcaaccttgcatcagccatttgttagccaggtcactctgttctttgtctgtaaatgagattgatcgttgttcccactgagagtgtcagctccttcccgtagagcaggcatgatgattgtactcacctctgacaccattgtgagtgccacattccttcccacgtccttgtcactgtaagagatgcccacctgagcaccaaccccaggttatcttcccctttgtcttccagccccccagaaacagctacgactcaacctacccaatcatttcatcatcagattgccactgtctctagttcaggtctcttgggactggcactcagaaatctcataataaatcctcttgaggcttctcatacactcgtcttcttccaatcttctttccctcaaaatctcatattttggttccacttcacccaccgtcattctccatatcactcccaggagttaggcaaaaagccccttccgttcttccgtatgttaaacttagaatcactctgttccctgctctgcgtttctattttttgtttttcctccatttactagtagcttaacactttctaacagtgttcttattattgatacgtatctatctcttccataagcttataaggtcacggataatacttctcattgtagtacgtaaatgacgtgggctagatatgagttgaataaacagttatacctgtaaattcttacagagtgaaaataaattgttatactttacaatttgtttctctctttagaccatttccaggacttgtgattaataaccgtgagtattttgtgaagtgttttgtttttgttttttcctggggtctgacgtgtgtgcgtgtgagtgtgtatacatgcttaacgtatatcacgttacttcacctatgtcagtaaccaggccaaatacttgttttagccctcagtaaaaacaccaggcacttcctagttgtaaaattattcaagcttcttaacttcctatcctcgatgcacttaatcataaaatggtaataatagcaccgattttgggggagtcgttccagtagatggaaagcatctggaacaggtgtcagcaagctcctgccgacgtgtatgcataaagttttattgaaaccaccatcgtgtccatttgtttatggcagaactgagagatggcagcagcaagtgtgtgcctgcaaaacctaaaatatttactaattggctctgcaagaaaagagtttgcatccccctaacctagaacagtgtctagcctctagtatgtgtttagcctacagtatgtgctcagcgaatacaatctatatttattactgcttttatgactgttataattactgtgcttggatttcgttacaaagtaagtcacaatgtgcctgcttctgttagtatttcagcacagtgcctggcacacatggggctctcaaatattgctgagcgagtgaacaaatgtcctttcaattccttaacgttgatgtcattttcaatagtattttgagccaaacttaattttgcgagtgtgttttgttttcttaactttattattaaaaatgtataaaagtgaggccaggcgtggtggctcacgcctgtaatcccagcagtttgggaggctgaggcaggcggatcagttgaggttgggagttggagaccagcccgtccaacatggtgaaagcctgtctctactaaaaatacaaaaatcagctgggtgtggtggcgcgtgcctgtaatcccagctactcaggaggctgaggcaggagagttgcttgaatcctagaggtggaggttgcagtgagctgagatcgtgccattgcactccagcctgggcaacaagagcaaaactctgtcccaataaataaataaataaaatgttctcttttgttcctgttcttgtgcggtagtgtggtatagagttttatggtaattactgtgaattagtgattctgagggacatatcagaactctgaggtttgtttccttctcatcttgagggaaacagcaaatgtatgttaaaatgcttttccaagggaacaacacatccttacattatttaaaccaatctgcttcattttcagagctggttgatcagagtgagtcagaaggccccgtgatacaaggtgagcgaggcaggggagggcccggagctactcctgcctgcacagtggcacacatggcgtgcctgcgtgtggcttcggctctcagtcacctgccctgaggggactcagttacacagcacacacatgcttctctgtggttttcactcctgggtttgacagctgatcaaaacataaattcaagctgtgggtcctgattgagaactgggggctgcagaccatttgcaccccctatcccagctcaggcctaacatcaggaaccccaggattaatgggtaggatgaaatggcagagcaagagggccgtcactttaacctgactctgccatccatttctaatgtctgccataagtcagtgagcaaaatgttcttcagtagaaatgtacagattgtgctcttaaaaaattccttaaaaaacaagtggaatggcctggtgctgtgtgagtcattgaaagtaatgagactgggcgcggtggctcacgcctgttatcccagcactttggaaggctgagaagggtagatcacttgagatcaggagttcgagaccagcctggccaacatggtgcaaccccgtctctactaagaatacaaaaactagccagacgtggtggcgtgtgccggctactcaggaggctgaggcaggagaaccgcttgagcctgggaggcggaggtcgcagtgagccaagatcgtgccactgcactccagcctgggcaacagaaaggagattctgtctcaaaaaaacaaacatacgaagaaaaacaaaaaaagtaatgaaaagcttttattaaagggagtaaacagaaggataagggagaaagcataactaaggagcttgttttcatggtagagctatgttaagactctgctctttcaaacttcagttgtatatgtgaacttaggaccacatttgaaaaacagaaatttgaaagtacacttggataatcgtgtgctccatctcaagaccgtgagcattgtttcatcatgcacctgtgtttgtacagagtctagagggcttttctcctcttcctcctcctgggttctttacatagtataaagcagctgttgaacaatgtggaaatcagtctctgtgtttctctttagaatcagctgaaccaagccagttggaagttccagccacagaaggtaaaagggtggggtggtcctgcaagtccttaagacttcttctttcttcttcttttttttttttttaaagacagagacttgctctgtcacccagggtggagtgaggttgcgcgatctctgcaacctccgcctcccgggctcaagcagttctcctgcctcagccacccgagtagctgggattacaggcctgcaccaccatgcttggctaatttttgtatttttagtagaaacggggtttcaccatgttggccaggctagtctcagacttctgacctcaagtgatccgccagccttggcctccaaagtgctcggattacaggcgcgagccaccttgcccagccaagacttttttatcaggacaaaggattgtgcatttaaactatttcactagaactgggtggtggttttgctctctttcttctgggtgaattggatttgcaggttatgctgttgagtgatgacgcatagctgcttttgctccatttcccccagatgacttggtaaattctccgtgaatgactctgctacataacctagataacctaacgtgtgtcctttaaatgcatgtaagccagaagatgtatgttactttgaaaacataagtaacaaaattttgaatgtattgctaaagagatgtctctctgaagctcttttgatgtttggtgtcttgtccttcttattaaaccatatcttagtaaatagtttggtacgaatggatttatcactgagcaggtctgcaaaataattaatcggtaccgttttgtttctgttgatagaaataaaagagactgatggaagctctcagatcaagcaagaaccagaccccacgtggtagacctcttccctcctagggtaaatcagcttctgtgtcagggatgctgtgtggtgtccatctgaaccccctgcatacgcgtagctaatgtgatctccccactttcacataagatggtggccctgccttcagggaatgtgggagccaggtgggagccttcccggatatttaagctagaagattctacagggagattctccttggatcaatatatgtctctcagtcaaagatgtaaaagcacttttgccttaaaaagaatgttctgtttctaaatagagtcaacgttgtcctcctcattggaattcactatgagtcagaatcattagactgacttttttttttccatagtaatagtattttgcagagtctcacagagctgcagatcttttgttcatcttgcagagttaacaagtctgatcctgttagtccagatttcttaaatttggccaagttataataggagcagtagcttgagacccgaagtcaggaaactttgacaatggatttttttttttaatccagagacttgtactggaatttgccttaccctgtcagctcatggacttaaggtttcatcccgctttatgagtgcttctgaatccaagtcattgttacctgaatttgcaaattaagttgtgatattcgtgactgttaaattcctgtaattagattaacctctttgcttgcttgtttgttttctctcctattttagcttaaagtatcagtggttgagaagagcttttcggacctgttactaccccaagctgtgtaatatacttgtataacagaaataccttctatacaaacctttttttctacttttagatagaaatgtctactttttcagcagttctgtgaattaaagagcagagtgactgtgggtctggaatggctggtgtacttgggaatgtactatcaggattttacagcaatgctgggaaatgacagggaaaatgacaggaatgaatctcaccagattttttatgtacgcagcagagccttgagttacggtgtttattttccaatcaagtgaagatatctcctacttctcctactggaacatctcagcttctgcagtgaagaaaaattcctgtgatagttcagttctttagtttttctatttgaaaaaaaaaaatcatttaaatgatcctttgttcacggctctccttaatgactgagtgaacagttcctatctgtatatttgactaaaccttttcctaagctatctctcatggttcctatgtttttttatcataattaaaagcaaaaccatctggatcacctaacagtcagaggtcagtatctcagcgtgtgaattatagaggaaatacagagagaacctcttccacttttacttttcgtccaaataaaatgcatggtgtaccagaagttgaagatcgggttgaggattggggctagctcgatgacactaaggccccaacatcgcgggacctgctgtggcgcggattcttaggaacgctgttctagccggccccctctccaggggtcgccgtggccggcattatttcctagttcttcttgtaaccctgaggtgccagcgcggggagtgaggaggggtcagggggctaaggatgcaacctctgacgttctgcgccttcctaggagagtcttacatgtgttgagatttcacaagcaatgcgagttgtaaaataccagctctacaagaagctaggctctgtgacggcatagttttcagtagctttatcacaatattcacaatggagaattatatgacatggtagcagaaataggcccttttatgtgttgcttctattttacctcaaattgtagatatagggtaatcaataaaatccatccatgcctttcacacactaag

SEQ ID NO: 799 - DNA, 32188 bp, Homo sapiens
ttgacccaattttctggaaataacaatatatagaaaattaggggatagattctttatcttatgagggtttgggcaagtcaaatacttagtttctgagccttattttgtctctagagcaagaaaactgtaaattaggcagccggtgaggggccctcacagctttggctgtgggttcaggacaccagatttctaccactcactttcttcttacttctcctgcacagggatcatggcccaagttgcaatgtccaccctccccgttgaagatgaggagtcctcggagagcaggatggtggtgacattcctcatgtcagctctcgagtccatggtgaggccttctgttccatcattccatagttgggtaggcctgcactgtagataaggttgatttgtttttgtggaagatagaattttatggtttttagttttaatgagtactttttctttacttttttttttttttttttttttttgagacggagtcttgctctgttgcccaggctagagtgcagtggcgagatcttggctcactgcaacctttacctcccgggttcaagcgattctcctgccttagccttccgagtagctgggattacaggcgcctgccaccacacctggctaattttttgtatttttagtaaagacagggtttgaccatcttggccaggccggtctcgaactcctgacctcttgatccacctgcctcagccgcccaaagtgctgggattacaggtgtgaaccactgccccaaccaatgagtagtttttcttcttgaatagttatgggtttaagcctttcacatcacagtcattcattcattcattcatttatttgagacagagtttcgctcttgttgcccaggctggggtgcaatggcatgatataggctccctgcaacctctgccccctgggttcaagtgattctcatgcctcagactcccgagtagctgggattgcaggtgtgcgccaccacgctcgggtaattttttgtatttttagtagagacagggtttcaccatgttggtcacgcgggtctcgaactcccgacctcaggtgatccacccaccttggcctcccaaagtgctgggattataggctgaggtcaggagttcaagactagcctggccaacattgtgaaaccctatctctactaaaaatacaaaaaaattagccagcgtggcagcgtgtgcctgtagtcccagtaacccgggaggctgagacaggagaattgcttgaacccgtgaggtggaggttgcagtgagccgagatcgcgccaccacactccagcctgggcgacagagtggaactctgtcttaaaaaaaaaaagaaaaagatgcccataaatattttgttcccaggttgttatggtggtattatttttaggggggaaaattggaatcaccaaccttttaaataatgttatcagtaaatcattcaaggtatattcattaaatggaatactatatactctgcaacattttaaaagaatatttaatctcgtagaaatatgcttagtaaaagtcagtaaatactctgcccacctaaaagtgattctggctgtgtgtacacaggggaatacttctggaggtggggattatgtaatgaatgctgtagtgtgggtttcagacccccaccctccttttgtactgagggcactaattgccccaggtgccatggctgttcgagccaccttgtacaagattccaccctttcccaggggagggccatgccagctcccagctctgggtgcagctacatcagtgttcagtgcttcgtctgtccagccctgcctgccttccgcctcccaagtgctgtaattgacagtgccccccagcaagcctgtgtaaactctcagtctactacttggagaatctgacctataagagattacaagggaattgtgttttttttttccttataaattctgtgttgtcttttgtttaaaatcaggccaaaaactatctcgaaagagaagtacctttaaaaaatgttagtttttttaattcatcgagcagaaatgatgctcttaaacgtccgcctgtaacatgatgtttgctgtttgtattgtagtgtaaagaactggccaagtccaaagccgaagtggcctgcattgcagtgtatgaaacagacgtgtttgtcgtcggaactgaaagaggacgtgcttttgtcaataccagaaaggattttcaaaaagattttgtaaaatattgtaagcattgtatttttatcttttgcatttcattaattttaagcctaaatatttgtaggtaagacaagttatattattttctttctttctttctttctttttttttttttttgagatggagttttgctcatgttgcctaggctggagtgcagtggcacactcttggctcaccacaacccccgctgcgtgagttcaagtgattctcctgcctcagcctcccaagtagctgggattacaggcacgcgccagcacgcctggctaattttgtatttttagtagagacggggtttctccatgttggtcaggctggtctcaaactcccgacctcaggtgatctgcccaccttggcctcccaaagtgcagagggattataggcgtgggccactgcgcctggccaagttatattttcttctaaaacagaatgaggtttaaactaaaaaagattttctgaaatgtttatggagacatttcaaaatgctcaaaaggaatcactgaaatatgtcaggatagatactgaagagttaagaaaaatggtagtgtttgttgtacggtgttccttgcttggctttactctgggttaatgagatgcattagagagaaggtaatgaaggtagagaaattttgaataggttaaaacttttactcagataaggagttattttctttttcttttttttttttgagacagagtttcactcttggccccctgggctggagtgcaatggcacgatctcggctcattgcaacctccacctcccatgttcaagcaattcttctacctcatcctcccgagtagctgggattacaggtgcccaccaccatgcctggctaatttttgtaattttagtaaagacagggttttgccatgttggccaagttggtctcaaactcctgacctcaggtgatctgcttgccttggcctcccaaagtgctaggatttcaggcatgagccaccactctcggctttttttttttttttaagagatggggtctcgctccgtcaccaggctggagtgcagtggcgcgatctccgctcactgcaacttccacctcctgtattcaagcaattcttctacctcagcctctggagtagctgggattacaggtgcacaccaccatacctagataattttttgtatttttagtacagacagggtttctccatgttggccaggctggtcttgagctcctgacccgaggagcccacctcggcctcccaaagtgctgggattacaggcgtgagccaccacatccggccgggagttcttttctagataaaaagttggtgtgttgaaaaccagtgattcactgtgcaagtttgtttaagcatattgcaaaattaaacagttctcctccactccctcacagatacgagtcaccttatcacagtcttcagtgagttttgtaatctgcatttagagcagtggtgagcttatttgacattggaacagtgttgaaatttactatagggttttaatacccacagcctttcacagtatgaccattttcatatctgtgtttaacctaacactgtaggttttatgttaactgattgatacagcattttcttaaaaacatggaaagggaacaaaaaaagctagggtatctataggcacatattatatatgggcatacctcattttttgttgttgtcatttttgtttttttgagacggagttttgctcttgttgcccaggctagagtgcaatggtgcgatctcggctcaccgcaacctctgcctcttgggttcaagtgattctcctgcctcagcctcccgagtagctgggattacaggcatgcaccaccacacccagctagttttgtatttttagtagagatggggtttctccatgttggtcaggctggtctcgtactcctgacctcaggttatctgcccgcctcggcctcccaaagtgctgggattacaggcgtgagccactgtgcccgaccgggcatatctcattttttttttttgtgccttgcagacactgcagttttcacacattgaagatttgtggcaaccttgtgtcaagtctattggtgccatttttcctgcagcatgtgcttacttggttctctgtgttgcattttggtaactcttggcatagcattatttgagactttttcatgattattgtatccgctgtagtggaattttttttttttttttttttttttttttgagatggaggtttgctccgtcaccctggctggagtgcagtggtgcgatctcggctcactgcatcccctgcctccttggttcaaggtattgagatcagtgatctttgatgttactattgtaattgtactgggagtcctcgaacgcacacatataatatggcaaacctaataggtaaatatgtgttctgactgcttcaccaatcgcctggtcccccatcattccctttcctcaggcctccctggtccctgagacacaatattgaaattaggccggccaggcacggtggctcatgcctgtcatcctagcactttgggaggccgagatgtgtggaccacgaggtcaagagatcgagaccatcctggccaacatggtgaaacaccatctctactaaaaatacaaaaaattagctgggtgtggtggcgcgtgcttgtagtcccagctatttgggaggctgaggcaggtgaattacttgaacctgggaggtggaggttgcagtgagccaagatcgcgccactgcactccagcctggcgaaagagcaagactccgtctcaacgaaaaaaaaaggaaattaggccaattaatagacctatagtggcctctgagtgttcaagtgaaaggaagagttgcaggctgctcactttacatcaaaagcagaaatgatgaagcttagtgaggaaggcatgtcagcagctgaggtaggctgaaagctaggctgaacaggtagccaggtggagaatgcgtaggaaaagttctcgaaggaaatgaaaactgctgctccagtgaacacgcaaatgataaagcaaaacagcttattgctgataggaagaaagtttgaatggtgtggatagaagatcaaaccagccacagcattcccttaagccacagcgtaatccagagtgaggccctaactctcttcaattctgtgaaggctgagatgggtgaggaagctgcagaagaaaaattggaagctagcagaggttggctcatgaggtttaaggaaagacacagtcagctgggggcggtggctcacgcctgtaatcccagcactttgggaggctgaggtgggcagatcgtctgagctcaggagttcaagaccaccctaggcaccctggtgaaaccccgtctcttctaaaatacaaaaaattagccaggcctggtggcgtgcacctgtagtcccagctgctctggaggctgaggtacgagaatcgcttgagcccaggaggcggaggttgcagtgagctgagatctcgccattgcactccagcctggactcttgagatctgtctcaaaagaaaaaaaaaggaaagacagagtctctataacataaaagtgcaaggtaaagcagcaagtgtttgatgtagaaactgcagcaagttctttagaagatctagctgaggtaattcatgaagatggctacactcacaaaacccgattttcaacgtagacaaaacagccttatattggaagatactctctaggactttgctagctagagagaagttcattcctggcttcaaagcttcaaaggacaagctgaattccttgtgaggggttaacgccgctggttactttgaagccatgttcatttaccattctgaaaatcctggggtcctgaagagttacactaaatctgctctgcctgtgctctattgatagaacaataaagcctggatgacagcacatctcttgatagtgttgttcaccgaatattttaagcccacttttgagacctactgctcagaaaaaaagattgctttcaaaatatgactgctcacagtcactcacagagtcctgatggaggtgtataaggagatgcttgccattttatttttattttttatttagttttttttgagacagagttttgctcttgttgcccatgctggagtgcaatggcgcgatctcagctcactgcaacctccatgaacactgttgaaatgataacaaaggatttagagtatgacataaacttagttcataaagcaatggcagggttttggaggattgactccaattttgaaacaagttctaccgtgggtgaaatgctaccaaatagcctcacactacagagagacctttcatgaaagcaagagtcaatgtaacttttatatgcattgggaaaccaaaacatctgtgtgactttactttatacttgtattattgtggtgatttggaaatgaacctgcagatgcttgtatgccactaaggtctaaagttaaacttctgatgtcagtttagattaaattggtgatacattcagcaacttattagtgaacaaaaagttttgttaattcacgaattttaattcccaattgtatttttagtttgttttaaaaactatcccctgccactgtattcctccccctgtcccttacccccatgctgtaatcttctaagctttatgttagtaacttatttttaaaatgttgacattattataatgttgagaaatgttcaagcattgattatgtttctgtgtttctttatactaataatgctgttttgattgtgtgtgtatcagctgctgtctgccccaccaataccataagcccgcctgcagctgtacttattctccccttccctgtcctgcctggcttatgtggttctccactggttagaactaagcattaagggcgctgtcctcagctgcaagctgtagtcactgtccatcagtattcatactttgtttttattgctaataattttttttttttttttaaggagtctcgccctgtcacccaggctggagtgcagtggcgtgatcttggctcactgcaacctcagcctcccaggttcaagcgattcttctgtctcagcctcccgagtagctgggattacaggcacacctggctaatttttgtatttttagtagagatggggttttgccctgttggcctggctggtctcgaactccttacctcaagtgatccacccaccttggcctcccaaagtgctaggattaccggcgtgagccaccgtgactggcctcattgttaataatttgatccatggagaatggtttctgtatctaattctccttcttctctttttttttgagacagagtctcactatcgcccatggagtgcagtggtgcgatcttggctcactgcaacttctgcctcccaggttcaagcaagtctcctgcctcagcctttctagtagctgggattacaggcgtgtgtcactacactcggctaattttttttttttttttcgagacggagtctcgctctgtcgcccaggctagagtgcagtggcacgatctcagctcactgcaagcttcacctcccgggttcacgccattcttctgcctccgcctcccaagtagctgggactacaggcgcccaccaccatgcctggctaattttttgtattttttagtagaggtggggtttcaccatgttggccagactgatcttaaactcctgacctcaggcgatctgccctccttggcctcccaaagtgctgggattacaggcatgagccactgcacccggcctaattctcaagtacctcttacttgtttgtgtaaagtactttgcagataaggagcaataatggtcttctggaaggtaatcaataggtttatgaggcaatcatagaaattcttcaggagaattctgagcgcttttctgggatttagaaaagcgttgttcagcagaaaaaagtatcatgtgagtctctcacataatttaaaactttctagttagaacattaaagaaaaataaagaaaaacaagtgaaattcattttactggtaatactttaacttattatatctaaaatatttcaacatgtaatcaatttaaaaattattaatgggccgggtgtggtggctcatgcctgtaatcccagcactttgggaggcagaggcaggcggatcacgaggtcaggagatcgagaccatgtggccaacatggtgaaaccctgtctctactaaaaatacaaaaattagctgggagtggtggcgcgcacctgtaatcccagctactcgggaggctgaggcagaagaatcgtttgaacctgggaggtggagattgcagtgagccacgatcgtgccactgcactccagcctggtgacagagcaagactccgtctccagaaaaaaaaaattattaatgggatatttgtcatactttttttgtaccaagtcttcaaaatccagtgtgtattgtacactcatgaaacatctgaatttggaccagccaagttgcaagtgccacatgtatctatttgttatcgtgctagactttgcaagcctagaatttttttgtgtcgataatcttctcatatttaaatttgtaaccaatacaaattttcttttttaaagtagtacaagggtactggtatgtagtatttttagctatagctacacttatttcagagatggtcaccatttcatattactttcattcatctaagtattttagatttttatttgaaaagttcccttttaaatctccatctccctgccttttattttttatttttttgagacggagtcttgctctgtcgccaggctggagtgcagtggtgcaatcttggctcactgcaccctccacctcccgggttcaagcaattctcctgcctcagcctcccaagtagctgagactacaggtgtgtgccaccatgcccagctaatttttgtatttttttttgtttgtttgtttgtttgtttgagacggagtctcactctgtcgcccaggctggagtgcagtggcgcaatttccgctcgctgcaagctccacctcccgggctcacgccattctcttgccccagcctcctgagtagctgggaccacaggcgcccgccaccacgcccggagaattttttgtatttttagtagagacggagtttcactgtgttagccaggatggtctcgatctcctgacctcgtgatccacccgcctcggcctcccaaagtgcagggattacaggcgtgagccaccgcgcccggcctaatttttgtatttttagtagagacggtggtttcatcatgttgaccaggacgctctcaatctcttgaccttgtcatctgccagcctcagcctcccaaagtgctgggattacaggtgtgagccaccgcacctggcctttttttttttttttttttttttttaatttaagagacacagtctctatccatcacccaggctggagtgctgtggtatgttctcggccccatcatagctcactgcagccttaaacttctagactcaagcagccctcacttcagcccccagacagctaggactgcagacatacaacactatacctggctattttcatttttttgcagagatgtgtccttgttatgttgccaaagctggtcttgaactcctgggctcaagcaatcctcctgcttcagcctcacaaggtggtggaattacaggcgtgagcccttgggcttgtcctcttttttgcttttataacaaatcacaaatgacttgctattttgttacaaaataacaaatcattggttacaatgattaataaatgttaaagaatggttaggaaatagttttttcctgttagaatacatgataaaagtagttttccctgttaggatacaggaaaacgatttttactaaaaaccaaatattaaggtaatggatatggaccttattattatttttttattttattttttattttttttacaggtgttgaagaagaagaaaaagctgcagagatgcataaaatgaaatctacaacccaggcaaatcggatgagtgtagatgctgtagaaattgaaacactcagaaaaacagttgaggactatttctgcttttgctatggtaaaaacaatagatttaatttttctaaaagatacattatataattgaattttctaaagggaagcttatgtaattgattcgaaaatcatataacacacattttcagtgactgaatggattagcaataaccttactttcttccacttccattttgaaggaacccaggaggaagtgtggccagtagagctgtttctttctttctgttttttttttttgagatggagtctcgctctgtcgcccaggctggagtgcagtggcacgatctcagctcactgcaatctccgcctcccggtttcaagtgattctcctgcctcagccccctgagtaactaggattacaggtgtccgccaccatgcccggctaatttttgtgttaaattttagtagagatggggtttcaccacattcgccaggctggtctcgaactcctgatctcaggtgatccacccaccttggcctcccaaagtgctgggattacaggcgtgagccaccatgcctggcctagctgtttctttctaataagcatgctcatctctctaattccatgcaaagccaccttttcttactcttgtcacatcataaaacaaagctcttacaagaaaacagtcaaaggaggagattgaggttttactgcagggtcataggtgaaaatcaattctctggaatgggattttcagtatgtgtgaggctcgctgcccaataggttgacagtatatactcatttgtaaatgggaagtttgtatttacctgataagttttcaatgagaatattagccaaaacattcctggtattttatggtaatagttggatgtgctgggcttctgtattctgaggccaaattgtacctgagaatatgccaggatgggaccatcttcaagaaagacaatagtgcaagaaaccaaccattgctctctctatgtgttttttaaagtaaaatattttatctacttttcattttggcccttcggatcagtttcaggtttagaccttctgctgacatggggagatagaatgctgtagtattaattaattttgaaatcatatattataaaaaatcatggatgcccttattaagccacaataagctagcgatgatttcattttgtaatcttaccattgaatgatgttcatccgcttttcatctgccccagggaaagctttaggcaaatccacagtggtacctgtaccatatgagaagatgctgcgagaccagtcggctgtggtagtgcaggggcttccggaaggtgttgcctttaaacaccccgagaactatgatcttgcaaccctgaaatggattttggagaacaaagcagggatttcattcatcattaagaggtgaagtgctttctccctttgtacccatcaacagttgattcgtataaatttgaatatttagcttacgttaatgtatttttaaaatttatatttaacacagaagtcatttaaatgtatgctttacaataattttgcgtattcatacgaagttttgttttgttttgttttaatgcagaccttttttagagccaaagaagcatgtaggtaagtaagtgctttgcttccttgatagctggctggcctccgttttgctagattttcatacactttaatggtttctgttttattgtctttgagaatatgatgtcagacattttcggatgggctgtttagatgtttatataatccacaaaaggttcattgagctaaaaaagtggagacttgtttttttgttttcagcttcgctgcttgttttctatagaagatcatacatctgccctcacttaccagaattatgagtaggatttaattgacctaatgtcatcgactcggcaagacgttgttgggcacagcattgggtggggaggggatacgcagctgtgtatcagcattaccacttttgagagctgtgagtctcacggaagagagaaaattctgtaaaatgaacatggcaagaacattgcatccctacggcaagaatggctctgagaaagtgctgtggatgttattggaggttggattcctttatagttcaggaaagagttcatgaggaagagagcatttccaggaagggcgtttgaagaatgatgcggatttcagcttcctttagggaagtctagccatttcatttgaagggaaaacaggataaagagtaataccctttagagccaggtttatttgagactttcggaagtaaataaccagtatcattggaatacttttaaacatgtaactatgaaaggaaaaaattatatatacataaacatacacattgtgttttctgttaacctttgtcttattctcattgtggtgaaaagattaattttttagcagctttattgaggtataattgatacaccataaaattcacctgccttttttttttattattattttttgagacggagtcttgctctgtcgccaaggctggagtgcagtggcgcgatcttggctcactgcagcctctgcttcccaggttcaagtgattctgcctcagcctcccgagtagctgggattacaggcacatgctgccacgcccggctaattttttgtatttttagtagagatggggtttcaccatgttaggatgatctcgaactcctgacctcaaatgatccacccgccccggcctcccaaagtgctgggattacaggcgtgagccactgtgcccagccaaattcacctgtcttaagtatataattcactaatagtagatttacaatcttaaaatgtttttaaggggtttttacccatcatcacagtcttaattttgggatgctttcatcgtccctgtctctgttatttcatgaatgttgtagaaatggaatatgtagtatgtatcctattgaaatgagcttttttcactgagcatcactcactcgaggctcatcgagcttggtaggtgtagccgtagcttctttttattgctgagcactaactattctgtgacatgaacatactgtctgttgatccagtcatcagtttatagatattttggttgtttccacctttgggtattgggaataatgttacagtgaacatacttgagcaaggttttgtctggacatattccttgatatctcttggatatttacgtaggagtgcaattactaggaatagggtaaatttacactgaactttttttttttttttaattgagacggagtctcgttctgtcaccaagttggagtgcagtggcatgatcttggctcactgcaacctccgcctcgtggattcaagagattcacctgcctcagcctcctgagtagctgggattacaggcacgcgccaccacacccggctaatttttgtatttttagtagagacgaggtttcaccatgttggccaggatggtctcaatctcttgacctcatgatcaagggaggcctctcaaagtgctgagattacaggcgtgagccatcgcgccctgctacactgaactttgaagaaactgacaagctgttttccaaggtggctataccatgttatattctcacagcaggataggagggttacccccacattgctgccaacttacttcttgattttagccattgtaatagatgtgaagtggtatctaattttttttgatttttaaaaatttctctagtgattgttgatgtgtttttacttttctttctttctttcttttttttttttttgagacagggtctcaccctgtcgcccaggctggagtgtagtggcgccatctcagcttagtgcagcctcaacctcccaggctcaagcaatcctgctgcctcagcttctcagtagctaggactacaggcgtgtgccaccatacccagctcatttctgaacctttttttggtagagacaagctcttgccgtgttggccaggctggtctggaactcctgagctcaagtgatccgcctgtgtcagcctcccaaagtgctgggattacaggcttgtgttatcttcaattgtgcttattggtcatccatacatattttttggagaaatatctatttaggtccttttcccatttaaaaattgggtttgtttgtctttttattattgagtcttgttttttatatagtcttgatataagtctctaattgatgatttgttaaaaaaaaattttttttttctttttgcaatggtgtcactctgttatccaggctggagtacaggatttgggaatattttctccaattctaataaatctacattatccttattgtataacttgtcttcttcccttacttggtagtatcctttgaggcacaaacgttttaaattttgataaaaataagtttattcttttgttaacttgtgcttttttttttgagacagagtctcgctgtgtcacccaggctggagtgcggtggcatgatctcagctcactgcaacctctgcctcccgggttcaagcaattctcctgtctcagcctcccgagtagctgggactacaggtgcccgccaccatgcccggataactttagtatttttagtggagacggggtttcaccatattggtcaggctggtctcaaactccagacctcaggtgatccacctgcctcagcctcccagagtgctgggattataggcgtgagccactgcgcctggccctcacttaagcttttgacttcatattcaagaaaccattgcgtaaacccaaaggcatgaagatatgacttctgtgttttcttccacaagtcttatagcttcaactctcacatttagatctatggttcattttgaggtcatttttgtatattatacaaggtaaaggtataaattcatctttttgcacgtggatatccaatgattccaggacaatttgcagaaaagaccgtcctttccctcaagatatccttgtcatctttgttgaaagtcttttgactctttgtttatttctgggctttctatgtaggagatcatgttgtgtgagaatcaagacaatttacccctttctttgcaatctaagtgcctcttatttcttcttcttgttgctctgactagaatataaatgtcacacagcattggtgatagcagacatcaccttgtgatattagtaggaaagcattctgtctttgaccatgaagtatgatgttagtggtaggatttttgtgtaaatctcttttaagatggagaaatatttatcatgtttatgttaaatttcagacttaaaagttttttttaaacttaattattatttttatttatttatttatttatttatttatttatttatttttttatttattttgagatggagtcttgctctgtcgcccaggctggagtgcagtggcatgatcttggctcactacaacatctgcctcccaggctcaagcaaatctcctgcctcagccttctgagtaactgggattacaggcgcccgccaccacacctggctaatttttatatttttttagcagagacgggggttcaccatgttggccaggctggtctcaaacccctgacctcaagcaatctacccatctcagcctcccaaagtgctgggattacaggtgtgagcctccacgcccagcctaatctcagcattttgggagaccagagtgggagtctcccttgaggccaggagttcgagataagcctgggcaacatagcaagatccaatttctacaaaaaatagaaaacaattagctgggagtggtaatgcatgcttctgtagtcccagctactcaggaggctgaggtaggaggattgcttgatcctcgagagttggaggctgcagtgagctatgatcatgccactgcacaccaacctgggcaacagagtaaaaccctgtttctaaaaaaaaaaaaaaaaaaaaaaaaaaatctgtttcatcatttatatgtcagcagagtcatattctccatattccatcttactagacaaatggtatgtttctgcatttctctcactgatgaaaataagagctttttcattcaaggaggttgtggttgggtgaagggatgaaaagcagtgtttattctggtgtgatccagagctgcaaagcctagttctaccccactaattctatatttaaagcctttagacatattatatttgaaatgttgaaaaactaactccaattttttttttttgtatgtaggtggtcgtgtgatggtaacagatgctgacaggtcaatactatctccaggtggaaggtaaaacctaatttcattactgctgtttaactcccacacctcaaaaagttttagttgttagataattgagatatcagaatattaaaaaggcctcatgtcacacatcttaaagtttaataggcaaggatatcatttggggatcttgtgaacatgccctctttgacttggtatttctgaatagtagagttcctgggaaaagccagaggcattggtcacactgtgaattggccttagagtggtatttggaagttaatatgctattctgtagtattttattatactgttttccccaaaagatagatagaaattaaagtactaagttcagttggtaactctttttttttttttttatttttgagatggagttttgctctttttgcccatgctagagtgaagtggcgcgatctcggctcactgcaacctctgaccccctgctgggttcaagcgattctcctgcctcagcctcccaaatagcagggactacaagcatgtgccaccatgcccagctaatttttttgtatttttagtagagacggggtttcaccgtgttggccaggctggtctcgaactcctgacctcgggtgatccacctgcctcggcctcccaaagtactgggattacaggcatgagccaccacgcctggcccgataagtcttaatatgctactctgtagtattttattgtacttttttccccaaaagatagatagaaattgaagtactaagttcagttgataactctttttttttgtggagacagagtctccctctgtggctcaggctggagttcagtggcatgatctcagctcactgcaacctccgcctcccggattcaagtgattcaggtgagcgccaccacgcctggctaatttttgtatttttagtagagatgaggtttcaccatattggccaggctggtcttgaactcctgacctcgtgatctgcccgcctcggcctcccaatgtgttgggattacaggcgtgagccactgtgcccggcccaataactcttatttatgcaataaataaatatgtcagttttaagctgagtcaggtttgcacccaccttggtcaagggagggatcttaacactttgagacccagagactttgaatgctgtgggaatggctgtcaccagcacgtggcttgatcagggctttcttctccttgcagttgtggccccatcaaagtgaaaactgaacccacagaagattctggtatgtactagcacttttagaatcaatggtgaaattaaggaagacttttccttagtgtagaagtttatagtttgactcaattattgttttgttttgataagaaagaggcagtcactactaatgtattccaactgtgacactatttgttaatgttatcacattaagacccagaaaggtaatttgctcagtaagtggtaggcagagttctttgccagttacatatgtttgtagataaaatgtatttttttttcccgttgtacagacatataatgtaagaggtcagctgttctatagtgctttttacaaaaatcaatagaatgcccccttcgtctccaccttccttctctgcactcctgttttccactctccaaggagaccattttcaattctcaaataaaattgctatttaattccttatttatttatttattttttgagatggagtcttgctttgtcacccagactgaagtgcagtggcacgacctcggctcactgcaacctctgcctctgggttcaagcgattctcccacctcagcctcccgagtagctgggattacaggcatacgccatcacgcacgactaatttttgtatttttagtagcgacggggtttcgccaggttggcctggctggtcttgaactcctgacctcaagtgatcctcctgcctcagccttccaaagtcctaggattacaggcataagccaccgtgcccggcccccgtttataattctgttctgtcctagaaccgtggcacccagatgttctcagcatatgtatttatttcatcatttcccagtgttatcctgtgtcctagtgccactgtcaagcctcccgctgctcggccctgtgccccttattcacacgggacactccttagtgggctgtcaccgccctgcctgccccctcatctccctctgtctgaccaggccctcggcagcttccccagccccttccccggccctttgtcagccttctcattctgccatgcttcctgggcagccacctgccccgcttcaccccatctaagggcatctcgaatgagttgttggggaggagggtagggccgcgttaacgtgtgtgtgcgtgcatgtgaatgagagcttttatgtatgtaagtgtattttgggagagctgcaagaaagtgttgaattatccttttttggaaaaggtatttgagtcttttacactgtttgctggttttacagaaggtttttcttttttctttattttcactccataggaaatctcaaatttttgtgtggttttcagtagattgtgccaaaaaaaatcatcattttgcaaatgtttccccttaattcatatattcatctcctgaatatttagtttgcttctaaaaagaaacatgctgaattcagaaaccccatgtgtttaattgaattctttcaactgtctttatgtacacatcagcatcattataggtttttttttttctcttttacactttgcatctttgtattcttaatttatcctgcaaataagatgtacatttatagccagggtgcagccaggagacagaaaccatatcagttattggaacagagaaaatttaatgtaaagattgttggccgggtgcagtggctcacacctgtaatcccagcactttgggaggctgaggcgagtggatcacctgaggtcaggagttggagaccggcctggccaacatggtgaaacccagtctctactaaaaatacaaaaaaaattagcagggcatggtggtgggcgcctgtaatcccagctactcaagaggctgagggaggagaatcgtttgaactcaggaggtagaggttacattgagtcaagatcgtgccattgcactccagcctgggcaacaagagtgaaactccatctcaaaacaaaacaaacaaaaacagattgttaactggttataaaattgttaactttgtaaccttaaggagaatactaaggtttttttttaggaacaattctaggcagtggctgccaccccatcagctttccatctgacttctgaggtggggtagtgtttggctggtgctggtggctgaggggcatggtgaggctgcttctggtagtgttggagacattgccaaccaggcacagctgttgtgatgggagggcctgctttggccaggctgaacgagggtaccaaggagtgacctttttgggatgagaatgcagacaagaagccaaaaggaaggcccagatctcttctcctcctctagcctttctctctgtagtgtatctttgtggcagagactcacatggagccagctgctatgcagagctcaaacttcagcagaaacccagaggatgggtttgcaactgagagacatcagttttgtgggtggcccaggctgttctctttggctgctcagcatatatacacacccttccctgcacatttgaccttctgtacaacaacgagacaactgttccatctaaagagatgcaactttacttcctacaaagaaatccatttttactctctcctcaaaatggggggacacagtgttccagcagtcacacccatcgctgggagactgactgaaaatccagtcgcgagctatgttacctgctctttaaatgcagtgcaaacctatttgagtaatctctagtctaatggacaaatggaaaggaaacttccagccaaactattgtgaaatactaccacacagaagagaatagttagtatatgcaagcatataatcttcacacaaacacatttgtaacagacaaggaagacaataggcatagtcgccacagtctacgtttctgcagcttaccagacttttttttggatttacctttttatttttatttatttatattttttgagacaaggtctcactctgtcgtccagactggagtgcagtcgtgcgatctcggctcaccacaacctccgtgtctcagattcaagcgattctcccacctcagcctcccgagcagctgggattacagacgtgtgccacccagccaatttttgtattattcatttatttattttagtagagacggggtttaaccatgttgaccaggctggtcttgaactcctgacctcaggtaatcatccgcctcagcctcccaaagtgctgggattataggcattagcctctgcacccagccagtatgtgtaaggttctttagccaattggagtgacccaaatttttattcctgaagggtctgaatccccagtggatctgccttttttgttagctgtaatgctgtgattttctttctttctttattttttttttttgagacggagtcttgctgtgtcgcccaggctggagtgtagtggtaccatctccgctcactgcaacctccacctcttgggttcaggtgatctttgtgcctcagcctctcgggtagctgggactacaggtgcgtgccaccactcccggctaatttttgtatttttagtagagacgaggtttcaccatgttggccaggctggtctcgaactcctgacctcaggtgattcgcccgcctggacctcccaaagtgctgggattacaggcacgagccaccgcacctggctgttagctgtaattttctattaacttttactgatggacatgaaagtgctaagttagcccagagagttgcaaaggtctcagatgcagtgttctctgccaccactgtgtagcagcaaaacactttccccttggtgattgaaggcaatggagtaactcctttttttgcttgttgcttcagggatgcataccctttgtatatcaatttaactctctttgagctctttctctagagttgaaaatattctttacaaagttgcccaagtcagagctcacgatttcgtttgtgttagggttggtatgactgtggttgaatatctcagtctgaaatgtgtatgtgcacccatgcattgttcatttctttttctttttttttgagagggagtctcgccgtgtcacccaggctggagtgcagtggcacaattttggcccttcccaaagtcaactttttaataacatcgattgcttttgcctattttgaccttcatatgagtggaattacacaacatgtactcttttgtatctggccacaaaggtctgcttcaaatcatctgtcctaattgtgggcaaagctttatgcagaaaggtgtgctttgtacccttacacaaatccctgtaataaaagggatgtattaggcagaaaaaaaccaatgtatctcattattgaaattgttgaccattatgctatctctcctttggaatactgagttattaaaactgatgtttataagtgtgtttcaatggtttataaaagtatttttaatattaagtgaaaagggagtgtggtaaaattttctttgattctaaagataagaatttgctggagaaaagagcagcacataattgcagaatattaataaatggttaaaactttgcattggctgggattatagtgattttttaccttctgctacctagcaaacttttgtcttttcaaagacgtaaagtctttacttaaaataaatatgcattgctgtatttatagggagggcagagaggatttccctacacaatctagctgaaagttctcacatgcaatcatatcattgcatttgcttttctaggcatttccctggaaatggcagctgtgacagtaaaggaagaatcagaagatcctgattattatcaatataacattcaaggtaatttgaattaatgcaatttttctttctaaaaattattcgtggttaaaattaaaatttgctcatcaattgctttaatttcttaaataatattttattgatcagttcttgattgacatatatattgtaattcagtcccggggataaaacatttaaaaatggggctaaaagatcaactcagacaatccagaggggatatgtaaaatagccatttgtgttcttaaaaggatgagcaaaagttgtggcacaatttagaattcaatcccaggttctagtgttgcaaaataaaacaaacctattaggcaaatgcagataatgtcagcttaattttttctcactgcataattatagtatattaaacacttaaagtaaaaaatctggttagctttgccatctacatatctaatacaccatcttcattgcatccaagataatgaaatatctataaccccaaaagtttcctgtgtccccttgttattcattgccctgcccagtattcaggcaacacggatctgttttctgttttaggttagtttgcattttctataaagtcttatgaatgaaataataaaatgtggactattttcatgggccggggagcagtgtggcttctttcatttcaaatgattgttttgaaattcatccacagcgttgcacgtatcagtagtagattccatttgattgttgatttgtattctattgtatgcctgagtcaaaatttattcatctctttgtctgttgatagccatttgggttcttccagtttggggccattacaaatagaggtactatgaacattgtgtagaggcttttgtgtggacataggccttcatttctctcttttttttttttttttttgagacagagtctcactctgttgcccaggctggagtgcagtggcgcgatcttggctcactgcaacctccacctcccaggttgaggtgattcttctgcctcagcctcccgaatagctgggatagcaggtgtgtgccaacacacctggctaatttttgtgttttttagtagacacagggtttcaccatgttggccaggctggtctcgagctcctgacctcaggtgatccacccgccttggcctcccaaagtactgggattacaggggctaacacgcttttttaaaatgaaatatttaaaacctaaaagcatagtatcagtctgcccaggtttagtgaaccatagtatttgtctcttctctcctccctccaagaaacaacgtgtaactatttcattgaagcctttctttgggctcccccaaatccccacttttctctctattcttaagttaaccatgatcttgaaaactgagaattgtccttcctgatggtgatgtgctttactacgtaaatattctcccgggagtgtgtgtgtgtgtgtgtgtgtgtgtgtgtgtgtgtgtgtgtgtgtcatgtcatatttattgttttatatatgccacttcctgagtgaagcttacacagtggtacactgtatgtgttgttgagtatagtctgtcactcaatttaagttttcaagatttatctttttttttttttttttggcgtgggggtggggatggatttttgctctgtcgcccaagctggagtgcagtggtgagatctcggctcattgcaacctccgcttgccgggttcaagcaattctctgcctcagctgggatttatctgttttgtcacaagtagatttaatcatgtcatcatggtagttacactgtgtgattataatacagttcgttttttcgttcttctacataaagacattgatgttttcttctaaaacttttgtattccaaaataggcttggatatatttctctgtgcacctcagtgctcctgtaaaatagtgacattcaaatgtgagtgttgggaatgtgttgattttctcaatgagtggtaggcacctcaagcatttgagaggtggaggttaagtatgttttagggtgaataaaatcaagtaccatttttagggtgaataaaattcaaatatgggacattaaaataatttgaaagtatagtgatacgtgaaggtattttgagtaaataccaactaaaaaaatatagtttagcaatattggaagccaaaaacagtagtagcaggatagaataagactatgtcgtatttaaaggaattggtcactaagttgatataacaaccattagtttgtatgtgcctaactatgtatcctcacagtaaaagtaaaaattatttacaaattataagtctctatagatatgtacagtcatgtgggagattttaaccaatgatatacgtctagctgatgaatactcttttaacatttatatgctaaatagaatattttcactacagttaatatatgtaagctaactatagaaaactgtgtacccaagaaataagtttatttacaaagcatgaatcatttataaaaattgactgtatacttgttcacagtcttaataaattctctgaacatactgaaattaaattattaatagaaaacatacacagtgggaatcctaggaaacatgcttgtaattgacttaatgagggcctcattaaaaatatttagaccagaatattgagaatgccacatagttaaacttgtgaagagcaactaaagcagtacttagaggtcaattagtagccttcactaaggttgcatttttaaatcctgtaaatagcacatcttccttttcttgagctctgtatattttactcagagtcagaagactaggaagcagtggatctagcatttgaatttaggagtctacattccaagacttgctcttctttgagattccaaatagaaactatttctttatttctcatgcaattgatttttttctctgatgtgtcctttgcctgtaatgtgtagtgtggtgcatctttgtgaaatttcttaggctttagagaatgaagcctttcaaacaacttcggatgttttcccaattctcttcagagatagttaactgaactgtggtcatattaatgccaaaatgtgttttatattaaatagccattgaaaacacaatgttttgttttctattttaaaactattattattttaatcattaaaaagtttgatgataacatgtaaatgtgttgtcaaaatatagcagtttgtgaagttgaatttaactcagagtactttctgtgttttggaaagaaccttattagaaaaagtgcccgctgtgctggaagaaagggagaatgaattaatagctgttagtttgtcacatttctatttcagtagagattcaaggagatggtttacgttattttagagattctaaggaaggtatataacatttggttctgcatttttcttcagtatgacaaaagagtaagcaaatatttgccaaagaagaaacaaataaacctgtgagataaacctgcatttgtaatctgtatgaagtaaaagttacagtttactgttatgaacattgtactgttttaaaaaacccacatcttccattttagacataccattcccattcaatccatatgtccagtcatcttcaaaatttcttttgactgtttacatatgaattcacctgattacatttttccattcaccaagaccataaattgacattgctcatcttgtcagtcttttttttttttaatttttttctttttatttataaaaaggccattccatgtatctcacccaaatttgttgactaaagtcaccccacatttttttttgggggggattacttttgaagtattatctttgtatcccaaagcaggcccttctgaaactgatgatgttgatgaaaaacagcccctatcgaagcctttgcaaggtataatcttttcacttccattctcccacatactgcttgtgtttaatgtttccttatattgcacagactgtgttttaatatttataagtacagtattacttttctaaatggaaaaggaaaaaaatgtattggcctttttttaacatataaatgaacttcacaagcaacaatttttcaaaaatcaattttcccttttgtgaatctagtaatgaatctcgaaatgggtacatgacacactttcctattgaaggtaaagtacacatttataccttatctcagaacagtcagaagccaggttactgttttattggttagtgatgcaaatattgataaggtcaggttgatacttagtatttagaagaattctgaaatagcacttgttaatctgtaagtttcgaattgattgcctttttggcaattttttacagtgttcccaaacttgatactcataggctattagtaatggcatttacttctatctattctggctttgagtgcataagatgtattttctttaggcttagcatataatgtaaatgtaattgtttatttcagattttaaaagacatacagaattattgcttacacgaacaatcatcttaactgttattctttgctgaaattttactttttacctactggcctcatcatttcactctcattcctttgacctcacatctcttttttctttgacttttacagtcaaataacttaatgctccataaattcaaatattaagattaaaaaaagagaaaggaagtgtgtagagaaagcatattttaaaaatgaattaaagagtgactcataggtataggtttgtagatttacctagagtttgagttcaggtgagttttcacaatataaagtaagtggaaaagaatccccagataattgtgacatgctaaagctagatactgagaaccaaaaagatgtgacctcagtatgggacttttaattcaaggatattagctaccaaatgacagtttttcagaccgtaagcattgctttttaaaaatcaagataaaatacatttataacatatcttacttttagtatagcttctgaatttagttctcaatagataagacaaaagagatgaacatctgcttcctttcccctcaagcgatgtattcttactaataggtaatatgtttttttttggtacttaaaggcagtgtttttcaatcttttccatgttagtagctcagatctttaaggacagaggatacaaattagggggcagcttgcgttcttaatcctaagtggctctctgatgtcttagattcttcctttcctttttgtgagtaaaacttctgctctagtaggatgagcctgttcaccttgtgactgcctaactgatcattgctttatgttccagtttttagaagcaggcagattatattacctgacttaaaatgcttttgagactaaaggtagtatcttaaattttaacttacgagtttcctttaagtacaactttgatgaaattatggggattgagtttccatggctttcaccatagtgaaaatggaaagcatgaaacattccacagcaaaccctgaacttatttatagggagttaattaagtgtctgatcacagcaagcatttactctgatctgtttgtgtatgtgtgtctttgacagatgagcatggtacttgaagcataattctgcttcctcagattccaatatctagtaattttatcatgtagttatagtaactaatattaaatccccaaacctacttaggtctactctgtatttgtgttttcaaataatttttttagcttccaaatagaagcgttgtattcttttctgaattagaaaacattgttcgacttaactgctaaagagttagacaatcattttgcatatgtttattatgtcttagattgtttgcattgttacctagattctctttcatctttcaatgtcagtttttattggtttattatatgttgtttattttctttttaggaagccaccattcttcagagggcaatgaaggcacagaaatggaagtaccagcagaaggttaggagaaaaagagattgcatattttccactatttgttgtatgtttattctattttatagattctattatccttaaaacaccttatttggaaataaaaggtgattcccttggtatgccttcctagccaacaggttattatttttttaaaaattctaagatgtaatatacttctttgaccatactgattaataaagcctatgggaatgaaactaagtggtaagtaaagctcttacatgatgcaaaatgctacttttttttttgtcctggttttcttgtgccatattaaatatcttttaaggaagaatagcttcagtgtttcagaattaaaattactagctccattcatattttattttcaaatgtattttttaatactttagtctcttagtagggtaggaatttagtctacataaaatttatacaggagagagtttctccctttattttgtactcacaactactccataaatgactttgtcagtttaccagctctacagctttggttttagaattgaacgcctgactgaggtacagttctttttgtttagaatcctgagttcaacttatcatgtagggtggcttcttatttccaaggtgtttaaacggttccacacaaatttttgtagatttctcccaaggaaaatgactggtaaggtaactgaatcttgttttagaattatttctctcataaattggtcatgttatcccttatttttctagaatgaaaagaggagtctgttatgtaactgcttatattccattgtatttacatttttattttaattaaaaaaaaacatttgtttgatcttttaccttctttgagggaaaggcaatcttaaaagttccccagtataggctggtttctccaaattcaattatagaattagggtttctccctggaatacatttctctcaaaaatactgatatgctcattgtaaaccgttggttacatttccctgtcagccctttttatagaagattgtgtgggtgaatgttgtatgctttactgtgtggaggtgggtatcttctgtgtgacagagttttcagctttgaataggcgggatttagaacaacaagacctaggtaatagatcatgtgcagtacgagggctcattgggcagtaccgatggctcaccgccttgcagccccgccggcaggtactgcaccttgaagactgcgtttttaggacatttttactgtcatattccagtgttaacaaagttgaatcgaatctgggttctggcctttattcctttactaacaagtaaacataatctttggcaaatcaattaatctctcaacctttgcacaatgaaagagaactaatgaaaatactctataagcttctagcactaacactctgatgtacatttgtcttgtgtaggaacaaatatgaatgaactttgtaatttttgaaatatgttgcatacaaagccagaggatatagtcttgtgtgcacttgtgacactcagtctcttgataggaaagtctccattgtaaagcctgggttgtggttttattgaacagtagaaaccactcctcacatttctgaaaggagagaagaaattctaaccaaagtagaaagcatttgtttctatccgagcatcttctagctgtggcaggaaattcattgtgactttgtcatatcctcattcctccaagactatgggatttttttgagtcaatttctgcaggtaacatgttatcatctaaatttttccagagtttttctaatttttgttttcttttatccctatttataatgacaagggtcaaattttaatttcattaatatgaaatgaatgaaaatgccagtggatttttatagtaggctgcttttggagtatcaaatcagtaaaatgttggaacatatggaaacatgcttaataatgaatgtcattttagaattttatttttttcaagattctactcaacatgtcccttcagaaacaagtgaggaccctgaagttgaggtgactattgaaggttagttatctaaaagccttgattccaaagtttacttctggtcataaaaatacttgtcacattcacattgctaaatatgcatttcattcatttttaaaggagacttgtgggacgaatacatgtgtctgtgtggccaaagcagcccactccccagtgctttgggagttttagatgacagaatgaggccgtgagaattagcattggcccacgggtggcccaagctatccttgctatcagtgggagttgaaaagagaaaaagaaaattatgaccagacttgatacacacaaaaacagattctataatctattgggttgtgatagaagaagacttatttggagctggaatccctaatttctaattaagtaaagtggaggagaaagtgttgatagtttagtgagtaatttttaaagcaagtccctgcccccttcaacgacccgcaaatactacttagaggctgacatacaatttatctttcaaaactgttttgaagcaatagctacaaatatattctacaatactctctatagctaagattgcttcaaacctgtttttttctccaaagataagcttgaactcagctgagccagtttatcctgaattatttgaaaattcagctaatagaattattaactatcacttcatattaatagttattaaatgagcattgcgtttttccttttaaattaatgtctcacagctgggcacggtggctcacacctgtaatcccagcactttgggaggccaaggtaggcagatcacctgaggtcgggagctcaagaccagcctgaccagcatggtgaaacgcccatctctactaaaaatacaaaactagctgggtgtggtggtgcatgcctgtaatcccagccacttgggaggctgaggcaggagaatcgcttgaaccctggaggcagaggttgtagtgtgctgagttcacgccattgcactacagcctgggcgacagagtgaaactccatctcaaaaaaaaaattaaaattaaaattaatgtgtcacaatacttgtgtaagtttcttcccctgaaagtacttctttcttgtggtaaaatgtgaaaatggtacagtaaattgtacagtggaaagttttcttcaccctcactctgctcccaagtcccaatactgagggatgtatgccagcttattgtgtctacttagagaaataattgcagtacatatcttgatgcgaaaatacacagatgctttcagcatacattacaatgcacattttaaaatattacatattccataggcctccccctcccataactgcacatcttggtactttattagtttttttttctagctgctgcgtaacctttcttggtttgctgtctgtctctctttctctcttaataacctgtcacctactgatgtcacttggttatttctagtgtttgactactccaaactactcaacgtgtctgtcttcattgcttctaaaatataagtcaattagtagcttccacttaatacaagaaatcttttcatacttcatgtgttaacttaatatacagatttcttttttcataaatataatttttctaatctaaaacattttgcattgtttacagtctagcattaaatggttgaaatttaattcgtttttagtgagaaacctcattaacaggaaaaaaatttaagaacatacaaatattacaactactcagctgtgccctttctatggagatattaataggaggttattaaaattataaaaataaagcttttagggtaggactaataaccattttgatttgtcaaatcttaaagcagatagaagctgtattttttttttttttttttttgagacagagtctggctctgtcgcccaggctggagtgcagtggtgcgatctcggctcactgcaagctctgccttcctggttcacgccattctcctgtagaggctgtattaaaatggtttagaatgtaaatacttgcttttatagtataagacttttaaagaaaggttacgaaaatccagaaataaatggctcatgaacctgaagcttatgtcagccttttgaactttaactgttttggatggagtaataaatctcttttcttttcatttatttgtttatttatttatttatttgtttttgagatggagtttcactcttgttgcctaggct

SEQ ID NO: 800 - DNA, 7606 bp, Homo sapiens
agatgatgataatgaaagactctcgaaagttgaaaaagctagacagctaagagaacaagtgaatgacctctttagtcggaaatttggtaagttttgcatttgcaaagtacagttgctataagcaaagagatttgttttaataagatcttttcagcagatgatggttagatggttgtaatcctatataaaaggagttaaaatttaaaagtgagttgtttgtgctaaatttatttaataagataccattagtgttacactattgattgtcagtatgaaagttaatgaatttaaggttcaccatctggcagtgtggctcacacttgtaatcccagcattttgggagcccgaggcaggtggatcagttgaggccaggagttcgagaccagcctggccaacatagtgaaaccctgtctctactaaaaaattcaaaaaattagccgggtatggtggtgcacacctgtaatcccagctactcaggaggctgtggcacgagaattgcttgaacctgggaggcagagattgcagtgagctgagatcaagccaccacactccaacctgggtgacagagcaagactctgtctcaaaaaaaaaaaaaaatttaaggttcatatttaaatttgtttgaagtgtacaaagaccttagttaacagcagagacagtctttaaaataaatgttgatcttgtgcttttgacaggctgtttaaggcggtgggttaatctgtgctgttgtgctgtttgtctcactgtccctgtaggtgaagctattggtatgggttttcctgtgaaagttccctacaggaaaatcacaattaaccctggctgtgtggtggttgatggcatgcccccgggggtgtccttcaaagcccccagctacctggaaatcagctccatgagaaggatcttagactctgccgagtttatcaaattcacggtcattaggtaagtgagagtttcctgcttagtcacaggagcgaatctggagctcatgaggctgactcttctaaaatgcagccacaggtagtcatcgaatccggcttcctatgctgtgcaatcaacaaatcaaaataacttgtgtcatcattagaatgtcagatgtgcttctacgaactaagctgactcttttaattctttggcaaagggttggcaaactaggactgtttgccaaattcaggctgcctcctatttttagagtcttcctgaaacacagctacacccgtattatccatggctgctttcctgtcacagtgagtaagtagctgggactgagaaggcatggcctccaaagtctaaaatatttactctctagcactttgtagaaaaaccttagctaggcacagtggctaacgcctgtaatcccagcattttgggaggccaaggcaggcagatcacctgaggtcaggagttccagaccagcctggccaacatggtgaaatcccatctctactgaaaataaaacagttagtccgggcatgatggcgggtgcctgtaatcccagctactcgggaggctgaggcaggagaatggcttgaacccaggaggtggaggttgcaatgagccaagatcatgccactgcactccagcctggacgacagagtgagactccatcacaagaaaaaaagaactttgtcaacctctgtcttagggcgccttgtcacaggcttcgggtcagacggattcaacctcgcatcagccatttgttagccaggtcactctgttctttgtctgtaaatgagattgatcgttgttcccactgagagtgtcagctccttcccatagagcaggcatgatgattgtactcacctctgacaccattgtgagtgccacattccttcccacgtccttgtcaccgtaagagatgcccacctgagcaccaaccccaggttatcttcccctttgtcttccagccccccagaaacagctacgactcaacctacccaatcatttcatcatcagattgccactgtctctagttcaggtctcttgggactggcactcagaaatctcataataaatcctcttgaggcttctcatacactcgtcttcttccaatcttctttccctcaaaatctcatattttggttccacttcacccacggtcattctccatatcactcccaggagttaggcaaaaagccccttccgttcttccgtatgttaaacttagaatcactctgttccctgctctgcgtttctattttttgtttttcctccatttactagtagcttaacactttctaacagtgttcttattattgatacgtatctatctcttccataagcttataaggtcatggataatacttctcattgtagtacgtaaatgacgtgggctagatatgagttgaataaacagttatacctgtaaattcttacagagtgaaaataaattgttatactttacaatttgtttctctctttagaccatttccaggacttgtgattaataaccgtgagtattttgtgaagtgttttgtttttgttttttcctggggtctgacgtgtgtgcgtgtgagtgtgtatacatgcttaacgtatatcacgttacttcacctatgtcagtaaccaggccaaatacttgttttagccctcagtaaaaacaccaggcacttcctagttgtaaaattattcaagcttcttaacttcctatcctcgatgcacttaatcataaaatggtaataatagcaccgattttgggggagtcgttccagtagatggaaagcatctggaacaggtgtcagcaagctcctgccgacgtgtatgcataaagttttattgaaaccaccatcgtgtccatttgtttatggcagaactgagagatggcagcagcaagtgtgtgcctgcaaaacctaaaatatttactaattggctctgcaagaaaagagtttgcatccccctaacctagaacagtgtctagcctctagtatgtgtttagcctacagtatgtgctcagcgaatacaatctatatttattactgcttttatgactgttataattactgtgcttggatttcgttacaaagtaagtcacaatgtgcctgcttctgttagtatttcagcacagtgcctggcacacatggggctctcaaatattgctgagcgagtgaacaaatgtcctttcaattccttaacgttgatgtcattttcaatagtattttgagccaaacttaattttgcgagtgtgttttgttttcttaactttattattaaaaatgtataaaagtgaggccaggcgtggtggctcacgcctgtaatcccagcagtttgggaggctgaggcaggcggatcagttgaggttgggagttggagaccagcccgtccaacatggtgaaagcctgtctctactaaaaatacaaaaatcagctgggtgtggtggcgcgtgcctgtaatcccagctactcaggaggctgaggcaggagagttgcttgaatcctagaggtggaggttgcagtgagctgagatcgtgccattgcactccagcctgggcaacaagagcaaaactctgtcccaataaataaataaataaaatgttctcttttgttcctgttcttgtgcggtagtgtggtatagagttttatggtaattactgtgaattagtgattctgagggacatatcagaactctgaggtttgtttccttctcatcttgagggaaacagcaaatgtatgttaaaatgcttttccaagggaacaacacatccttacattatttaaaccaatctgcttcattttcagagctggttgatcagagtgagtcaaaaggccccgtgatacaaggtgagcgaggcaggggagggcccggagctactcctgcctgcacagtggcacacatggcgtgcctgcgtgtggctttggctctcagtcacctgccctgaggggactcagttacacagcacacacatgcttctctgtggttttcactcctgggtttgacagctgatcaaaacataaattcaagctgtgggtcctgattgagaactgggggctgcagaccatttgcaccccctatcccagctcaggcctaacatcaggaaccccaggattaatgggtaggatgaaatggcagagcaagagggccgtcactttaacctgactctgccatccatttctaatgtctgccataagtcagtgagcaaaatgttcttcagtagaaatgtacagattgtgctcttaaaaaattccttaaaaaacaagtggaatggcctggtgctgtgtgagtcattgaaagtaatgagactgggcgcggtggctcacgcctgttatcccagcactttggaaggctgagaagggtagatcacttgagatcaggagttcgagaccagcctggccaacatggtgcaaccccgtctctactaagaatacaaaaactagccagacgtggtggcgtgtgccggctactcaggaggctgaggcaggagaaccgcttgagcctgggaggcggaggtcgcagtgagccaagatcgtgccactgcactccagcctgggcaacagaaaggagattctgtctcaaaaaaacaaacatacgaagaaaaacaaaaaaagtaatgaaaagcttttattaaagggagtaaacagaaggataagggagaaagcataactaaggagcttgttttcatggtagagctatgttaagactctgctctttcaaacttcagttgtatatgtgaacttaggaccacatttgaaaaacagaaatttgaaagtacacttggataatcgtgtgctccatctcaagaccgtgagcattgtttcatcatgcacctgtgtttgtacagagtctagagggcttttctcctcttcctcctcctgggttctttacatagtataaagcagctgttgaacaatgtggaaatcagtctctgtgtttctctttagaatcagctgaaccaagccagttggaagttccagccacagaaggtaaaagggtggggtggtcctgcaagtccttaagacttcttctttcttcttcttcttttttttttttttaaagacagagacttgctctgtcacccagggtggagtgaggttgcgcgatctctgcaacctccgcctcccgggctcaagcagttctcctgcctcagcctcccgagtagctgggattacaggcctgcaccaccatgcttggctaatttttgtatttttagtagaaacggggtttcaccatgttggccaggctagtctcagacttctgacctcaagtgatctgccagccttggcctccaaagtgctcggattacaggcgcgagccaccttgcccagccaagacttttttatcaggacaaaggattgtgcatttaaactatttcactagaactgggtggtggttttgctctctttcttctgggtgaattggatttgcaggttatgctgttgagtgatgacgcatagctgcttttgctccattttccccagatgacttggtaaattctccgtgaatgactctgctacataacctagataacctaagtgtgtcctttaaatgcatgtaagccagaagatgtatgttactttgaaaacataagtaacaaaattttgaatgtattgctaaagagatgtctctctgaagctcttttgatgtttggtgtcttgtccttcttattaaaccatatcttagtaaatagtttggtacgaatggatttatcactgagcaggtctgcaaaataattaatcggtaccgttttgtttctgttgatagaaataaaagagactgatggaagctctcagatcaagcaagaaccagaccccacgtggtagacctcttccctcctagggtaaatcagcttctgtgtcagggatgctgtgtggcgtccatctgaaccccctgcatacgcgtagctaatgtgatctccccactttcacataagatggtggccctgccttcagggaatgtgggagccaggtgggagccttcccggatatttaagctagaagattctacagggagattctccttggatcaatatatgtctctcagtcaaagatgtaaaagcacttttgccttaaaaagaatgttctgtttctaaatagagtcaacgttgtcctcctcattggaattcactatgagtcagaatcattagactgacttttttttttccatagtaatagtattttgcagagtctcacagagctgcagatcttttgttcatcttgcagagttaacaagtctgatcctgttagtccagatttcttaaatttggccaagttataataggagcagtagcttgagacccgaagtcaggaaactttgacaatggattttttttttttaatccagagacttgtactggaatttgccttaccctgtcagctcatggacttaaggtttcatcccgctttatgagtgcttctgaatccaagtcattgttacctgaatttgcaaattaagttgtgatattcgtgactgttaaattcctgtaattagattaacctctttgcttgcttgtttgttttctctcctattttagcttaaagtatcagtggttgagaagagcttttcggacctgttactaccccaagctgtgtaatatacttgtataacagaaataccttctatacaaacctttttttctacttttagatagaaatgtctactttttcagcagttctgtgaattaaagagcagagtgactgtgggtctggaatggctggtgtacttgggaatgtactatcaggattttacagcaatgctgggaaatgacagggaaaatgacaggaatgaatctcaccagattttttatgtactcagcagagccttgagttacggtgtttattttccaatcaagtgaagatatctcctacttctcctactggaacatctcagcttctgcagtgaagaaaaattcctgtgatagttcagttctttagtttttctatttgaaaaaaaaaaatcatttaaatgatcctttgttcacggctctccttaatgactgagtgaacagttcctatctgtatatttgactaaaccttttcctaagctatctctcatggttcctatgtttttttatcataattaaaagcaaaaccatctggatcacctaacagtcagaggtcagtatctcagcgtgtgaattatagaggaaatacagagagaacctcttccacttttacttttcgtccaaataaaatgcatggtgtaccagaagttgaagatcgggttgaggattggggctagctcgatgacactaaggccccaacatcgcgggacctgctgtggcgcggattcttaggaacgctgttctagccggccccctctccaggggtcgccgtggccggcattatttcctagttcttcttgtaaccctgaggtgccagcgcggggagtgaggaggggtcagggggctaaggatgcaacctctgacgttctgcgccttcctaggagagtcttacatgtgttgagatttcacaagcaatgcgagttgtaaaataccagctctacaagaagctaggctctgtgacggcatagttttcagtagctttatcacaatattcacaatggagaattatatgacatggtagcagaaataggcccttttatgtgttgcttctattttacctcaaattgtagatatagggtaatcaataaaatccatccatgcctttcacacactaag

SEQ ID NO: 801 - DNA, 7608 bp, Homo sapiens
agatgatgataatgaaagactctcgaaagttgaaaaagctagacagctaagagaacaagtgaatgacctctttagtcggaaatttggtaagttttgcatttgcaaagtacagttgctataagcaaagagatttgttttaataagatcttttcagcagatgatggttagatggttgtaatcctatataaaaggagttaaaatttaaaagtgagttgtttgtgctaaatttatttaataagataccattagtgttacactattgattgtcagtatgaaagttaatgaatttaaggttcaccatctggcagtgtggctcacacttgtaatcccagcattttgggagcccgaggcaggtggatcagttgaggccaggagttcgagaccagcctggccaacatagtgaaaccctgtctctactaaaaaattcaaaaaattagccgggtatggtggtgcacacctgtaatcccagctactcaggaggctgtggcacgagaattgcttgaacctgggaggcagagattgcagtgagctgagatcaagccaccacactccaacctgggtgacagagcaagactctgtctcaaaaaaaaaaaaaaatttaaggttcatatttaaatttgtttgaagtgtacaaagaccttagttaacagcagagacagtctttaaaataaatgttgatcttgtgcttttgacaggctgtttaaggcggtgggttaatctgtgctgttgtgctgtttgtctcactgtccctgtaggtgaagctattggtatgggttttcctgtgaaagttccctacaggaaaatcacaattaaccctggctgtgtggtggttgatggcatgcccccgggggtgtccttcaaagcccccagctacctggaaatcagctccatgagaaggatcttagactctgccgagtttatcaaattcacggtcattaggtaagtgagagtttcctgcttagtcacaggagcgaatctggagctcatgaggctgactcttctaaaatgcagccacaggtagtcatcgaatccggcttcctatgctgtgcaatcaacaaatcaaaataacttgtgtcatcattagaatgtcagatgtgcttctacgaactaagctgactcttttaattctttggcaaagggttggcaaactaggactgtttgccaaattcaggctgcctcctatttttagagtcttcctgaaacacagctacacccgtattatccatggctgctttcctgtcacagtgagtaagtagctgggactgagaaggcatggcctccaaagtctaaaatatttactctctagcactttgtagaaaaaccttagctaggcacagtggctaacgcctgtaatcccagcattttgggaggccaaggcaggcagatcacctgaggtcaggagttccagaccagcctggccaacatggtgaaatcccatctctacaaaaataaaacagttagctgggcatgatggcgggtgcctgtaatcccagctactcgggaggctgaggcaggatagtcgcttgaacccaggaggtggaggttgcaatgagccaagatcatgccactgcactccagcctggacgacagagtgagactccatcacaagaaaaaaagaactttgtcaacctctgtcttaggcgccttgtcacaggcttcgggtcagacggattcaacctcgcatcagccatttgttagccaggtcactctgttctttgtctgtaaatgagattgatcgttgttcccactgagagtgtcagctccttcccatagagcaggcatgatgattgtactcacctctgacaccattgtgagtgccacattccttcccacgtccttgtcaccgtaagagatgcccacctgagcaccaaccccaggttatcttcccctttgtcttccagccccccagaaacagctacgactcaacctacccaatcatttcatcatcagattgccactgtctctagttcaggtctcttgggactggcactcagaaatctcataataaatcctcttgaggcttctcatacactcgtcttcttccaatcttctttccctcaaaatctcatattttggttccacttcacccacggtcattctccatatcactcccaggagttaggcaaaaagccccttccgttcttccgtatgttaaacttagaatcactctgttccctgctctgcgtttctattttttgtttttcctccatttactagtagcttaacactttctaacagtgttcttattattgatacgtatctatctcttccataagcttataaggtcatggataatacttctcattgtagtacgtaaatgacgtgggctagatatgagttgaataaacagttatacctgtaaattcttacagagtgaaaataaattgttatactttacaatttgtttctctctttagaccatttccaggacttgtgattaataaccgtgagtattttgtgaagtgttttgtttttgttttttcctggggtctgacgtgtgtgcgtgtgagtgtgtatacatgcttaacgtatatcacgttacttcacctatgtcagtaaccaggccaaatacttgttttagccctcagtaaaaacaccaggcacttcctagttgtaaaattattcaagcttcttaacttcctatcctcgatgcacttaatcataaaatggtaataatagcaccgattttgggggagtcgttccagtagatggaaagcatctggaacaggtgtcagcaagctcctgccgacgtgtatgcataaagttttattgaaaccaccatcgtgtccatttgtttatggcagaactgagagatggcagcagcaagtgtgtgcctgcaaaacctaaaatatttactaattggctctgcaagaaaagagtttgcatccccctaacctagaacagtgtctagcctctagtatgtgtttagcctacagtatgtgctcagcgaatacaatctatatttattactgcttttatgactgttataattactgtgcttggatttcgttacaaagtaagtcacaatgtgcctgcttctgttagtatttcagcacagtgcctggcacacatggggctctcaaatattgctgagcgagtgaacaaatgtcctttcaattccttaacgttgatgtcattttcaatagtattttgagccaaacttaattttgcgagtgtgttttgttttcttaactttattattaaaaatgtataaaagtgaggccaggcgtggtggctcacgcctgtaatcccagcagtttgggaggctgaggcaggcggatcagttgaggttgggagttggagaccagcccgtccaacatggtgaaagcctgtctctactaaaaatacaaaaatcagctgggtgtggtggcgcgtgcctgtaatcccagctactcaggaggctgaggcaggagagttgcttgaatcctagaggtggaggttgcagtgagctgagatcgtgccattgcactccagcctgggcaacaagagcaaaactctgtcccaataaataaataaataaaatgttctcttttgttcctgttcttgtgcggtagtgtggtatagagttttatggtaattactgtgaattagtgattctgagggacatatcagaactctgaggtttgtttccttctcatcttgagggaaacagcaaatgtatgttaaaatgcttttccaagggaacaacacatccttacattatttaaaccaatctgcttcattttcagagctggttgatcagagtgagtcaaaaggccccgtgatacaaggtgagcgaggcaggggagggcccggagctactcctgcctgcacagtggcacacatggcgtgcctgcgtgtggctttggctctcagtcacctgccctgaggggactcagttacacagcacacacatgcttctctgtggttttcactcctgggtttgacagctgatcaaaacataaattcaagctgtgggtcctgattgagaactgggggctgcagaccatttgcaccccctatcccagctcaggcctaacatcaggaaccccaggattaatgggtaggatgaaatggcagagcaagagggccgtcactttaacctgactctgccatccatttctaatgtctgccataagtcagtgagcaaaatgttcttcagtagaaatgtacagattgtgctcttaaaaaattccttaaaaaacaagtggaatggcctggtgctgtgtgagtcattgaaagtaatgagactgggcgcggtggctcacgcctgttatcccagcactttggaaggctgagaagggtagatcacttgagatcaggagttcgagaccagcctggccaacatggtgcaaccccgtctctactaagaatacaaaaactagccagacgtggtggcgtgtgccggctactcaggaggctgaggcaggagaaccgcttgagcctgggaggcggaggtcgcagtgagccaagatcgtgccactgcactccagcctgggcaacagaaaggagattctgtctcaaaaaaacaaacatacgaagaaaaacaaaaaaagtaatgaaaagcttttattaaagggagtaaacagaaggataagggagaaagcataactaaggagcttgttttcatggtagagctatgttaagactctgctctttcaaacttcagttgtatatgtgaacttaggaccacatttgaaaaacagaaatttgaaagtacacttggataatcgtgtgctccatctcaagaccgtgagcattgtttcatcatgcacctgtgtttgtacagagtctagagggcttttctcctcttcctcctcctgggttctttacatagtataaagcagctgttgaacaatgtggaaatcagtctctgtgtttctctttagaatcagctgaaccaagccagttggaagttccagccacagaaggtaaaagggtggggtggtcctgcaagtccttaagacttcttctttcttcttcttcttttttttttttttaaagacagagacttgctctgtcacccagggtggagtgaggttgcgcgatctctgcaacctccgcctcccgggctcaagcagttctcctgcctcagcctcccgagtagctgggattacaggcctgcaccaccatgcttggctaatttttgtatttttagtagaaacggggtttcaccatgttggccaggctagtctcagacttctgacctcaagtgatctgccagccttggcctccaaagtgctcggattacaggcgcgagccaccttgcccagccaagacttttttatcaggacaaaggattgtgcatttaaactatttcactagaactgggtggtggttttgctctctttcttctgggtgaattggatttgcaggttatgctgttgagtgatgacgcatagctgcttttgctccattttccccagatgacttggtaaattctccgtgaatgactctgctacataacctagataacctaagtgtgtcctttaaatgcatgtaagccagaagatgtatgttactttgaaaacataagtaacaaaattttgaatgtattgctaaagagatgtctctctgaagctcttttgatgtttggtgtcttgtccttcttattaaaccatatcttagtaaatagtttggtacgaatggagtgttatgcagctgagcaggtgctgcaaaataattaatcggtaccgttttgtttctgttgatagaaataaaagagaagctgatggaagctctcagatcaagcaagagccagaccccacgtggtagactcttcctctagggtaaatcagcttctgtgtcagggatgctgtgtggcgtccatgctgaaccccctgcatacgcgtagctaatgtgatctccccactttcacataagatggtggccctgccttcagggaatgtgggagccaggtgggagccttcccggatatttaagctagaagattctacagggagattctccttggatcaatatatgtctctcagtcaaagatgtaaaagcacttttgccttaaaaagaatgttctgtttctaaatagagtcaacgttgtcctcctcattggaattcactatgagtcagaatcattagactgacttttttttttccatagtaatagtattttgcagagtctcacagagctgcagatcttttgttcatcttgcagagttaacaagtctgatcctgttagtccagatttcttaaatttggccaagttataataggagcagtagcttgagacccgaagtcaggaaactttgacaatggattttttttttttaatccagagacttgtactggaatttgccttaccctgtcagctcatggacttaaggtttcatcccgctttatgagtgcttctgaatccaagtcattgttacctgaatttgcaaattaagttgtgatattcgtgactgttaaattcctgtaattagattaacctctttgcttgcttgtttgttttctctcctattttagcttaaagtatcagtggttgagaagagcttttcggacctgttactaccccaagctgtgtaatatacttgtataacagaaataccttctatacaaacctttttttctacttttagatagaaatgtctactttttcagcagttctgtgaattaaagagcagagtgactgtgggtctggaatggctggtgtacttgggaatgtactatcaggattttacagcaatgctgggaaatgacagggaaaatgacaggaatgaatctcaccagattttttatgtactcagcagagccttgagttacggtgtttattttccaatcaagtgaagatatctcctacttctcctactggaacatctcagcttctgcagtgaagaaaaattcctgtgatagttcagttctttagtttttctatttgaaaaaaaaaaatcatttaaatgatcctttgttcacggctctccttaatgactgagtgaacagttcctatctgtatatttgactaaaccttttcctaagctatctctcatggttcctatgtttttttatcataattaaaagcaaaaccatctggatcacctaacagtcagaggtcagtatctcagcgtgtgaattatagaggaaatacagagagaacctcttccacttttacttttcgtccaaataaaatgcatggtgtaccagaagttgaagatcgggttgaggattggggctagctcgatgacactaaggccccaacatcgcgggacctgctgtggcgcggattcttaggaacgctgttctagccggccccctctccaggggtcgccgtggccggcattatttcctagttcttcttgtaaccctgaggtgccagcgcggggagtgaggaggggtcagggggctaaggatgcaacctctgacgttctgcgccttcctaggagagtcttacatgtgttgagatttcacaagcaatgcgagttgtaaaataccagctctacaagaagctaggctctgtgacggcatagttttcagtagctttatcacaatattcacaatggagaattatatgacatggtagcagaaataggcccttttatgtgttgcttctattttacctcaaattgtagatatagggtaatcaataaaatccatccatgcctttcacacactaag

SEQ ID NO: 802 - DNA, 32248 bp, Homo sapiens
cacgcctgtaatcccagcactttgggaggctgaggcaggcggatcacaaagtcaggagttcaagaccagcctggctaatatggtaaaaccctgtctctactaaaaatacaaaattagccgggtgtggtggtgcatgcctgtagtcccagctactcgggaggctgaggcaggagaattgcttgaacccgggaagcggaggttgcagtgagcagagatcacaccactgcactccagcctgggcaacagagtgagactctgtctcaaaaaaaaaaagaataagggggtgacacctcagagaacaagctgcaggcctggtgtcacctgcagatgacaaggctaccgtatccattcctcaagccaggcctctgaggagccctggtgggtagggtgctggagggagaactcgagcttgcaggcagtaaaacgcatttttttttttttttttttggtggcggggacagagtctcaccctgccgcccaggctggagtgcagtggcgcaatctcagctcactgcaaactcttgactcctgggtttgagcgattctcctgcctcagcctcccgagtagctgggattacaggtgtgcaccaccacactcagctaattttggcgtttttagtagagacagggtttcgccatgttggccaggctggtctcaaactcctgaccttgggtgatcaacctgcctcagcctcccaaagtgctgggattacaggcgtgagccactatgcctggccacatttctttctttcttctttttttttttttaatctgtgcttttctccaccctcttcagactttgttctagtctacaatttccctcctgcagcttctctctgatgacgtccccacccagcccgtcagtccaaattagcctggtttaactgcgtttgtcagtttctgtagaagaatgaagaaggtgatagcacccacgttatagggctgttcacgggaggttgaagtgagatcttacagagaaagtgcttagcaggtgccccaggtccagagtgtggggttggctgggagtcgtgtgcatttcctgccctgaccccctctgcaagcttggttcctgagtgcttgagtgaggcacacttgacctgcttatgtgattcccatggcaccatggtgtggggaatgtctcccaacaagacaccttatcaagcgctctctctccactctgctgttcctaccacatattcccaggcaggtcaccctacctttcttgttttcttttgaagacagggtctcgctcggtcacccaggccagagttcagtggcaaaatcatagctcactgcagctcctggactcaagggatcctcctgcctcagcctcctgaatagctggggccgcaggtgtgtgccaccacacctggctaatttttacaatattttgtagagacagggtttcactttgttgcccaggctggcctcaaactcctggcctcaaacgatcctcctgcctcggcctccaaaagtgctgtgatttcagacgtgagccacctcacctggcctgacccggcctttctgagccttcagccctcatctttgtctgggggcattctaaaaaccaaggaatagaataccagggtcagactcagactttgcgttcagtaggccatgaatacttgggttttcgctcagtttctggggcattgagactgatagaagcaactgacccccttagctaaggcaggcaggcaggtattgtcaccaagagaccctggagatcaggagaggttatttggggttggggatctccaaggaggggcagggaagttagtaccatcgtcgggctggaaatgggaagcgtttggctcgttggaagtggtgaggctggggtgtgggaccctcgccatgtgacctacgtggggtgatctcagtagaaattgggacctgccaaccatggttgcctgggagagttgcctgggcacctgcctgtgatcccaactactcaggaggctgaggtgggaggattgcttgagcctaggaggtagaggttgcagtgagccaagattgcatcactgaactccagcctgggcaacagaacaattctctgtctcaaaaacaaaaacaaaaacaaaaacaaaaaaacaaaaaaaaactatttacccaatttcccttgcttatgcatgcttaaattttgtataagcttaaatatcttttccatctaagctgtactctatccccttttataactttaggtggctgtctttattaaaagttttttcttgaaagtcttaaaacaatatagttcttggcaatttgaaagttatttgagaaggggaaatttataatgacaattcaaatgaagcaaactaaaaaataatgaagaaagacagaggaaaaagcagtattcacttgaacacatcccaaacaaagaaaatttcaaatgtaacaaggaaaaagcctgctaaagctcacaatacagaaataactattgatactcaaaatagctttaaagccctgctcaccttttgaatgttgggaattgaccaggaggtgactgtaactgtaagatggttcttccagtaatgaccattttctttttcaagatgatgattattctccaccgtctaagagaccaaaggccaatgagctaccgcagccaccagtcccggaacccgccaatgctgggaagcggaaagtgagggagttcaacttcggtaagttctcagcgaacgacgtgaccttttccttcatcttctggattctcagtgtgactgataaatgttgcaacatgctctgcagggggaaaatgctttagcgtctattactgcatcataatctcatctttggaaagccaggagcattttgaaaattacattacagacattgtttaaacatagtttggatttaccaaagcataggacattgtcttgtctgatgttaattagtcagctcaagattagtgctaaagacttagtaatttagttatttctcttagctttaaaatctttatttcagaactatttcacctcttggttttcttttttttttttttgctctgtgttactgcagctgctaatctgtgagctctcaatggatgatgtatcctagcaagggactgaatgagatattagcggcaaattatgttgatgattcatattttgaataaatggaatattaagcttgtatacatcttgaaaatagtactttaatattctactgtgtcatagtcacaatgattggatatgaattgaatttttgtactttttaaatatgtttttgttctttatttttaatttttattattatttttttgagacagagtcttgctctgtcacccaggttggagtgcagaggcacgatctcagctcacagcaacctccgcctcccgggttcaagtgattcttctgcctcagcctcctgagtagctgggattacaggcgcccaccaccatgcccagctaattgttgtatttttagtagagatgggatttcaccatgttggccaggctggaatcgaactcctgacctcaggtgatccgcatgcctcagcctcccaaagtgctgggattacaggcatgagccactgcacttggcctgttctttagcattttaagttgcaactatatatccgtaaagtcttatttccacacaactaacacatgttttaggaagtttgctaaaagacccctggagacctttatcgtggtctcccttttgtcgtgtttcatttgcttgatcttttctgccctcctgcttttcagaaattaaaaggctaaaaagaggtgctaaatgttaaaacttctcgtgtagtctcccatgagactattaaaagtaatggcaaaagccacagttacttttgcaccaacctactaattctaagaaccaccaaaaaggggaaagttcttggaaagcagtaaaatgatatggacagttgggatgtaaaaatgtagaaaatatgtcattgtatgttcagtcatcccaagaccctagtgctgccccgatggtagggacttcttaatgagaattaacttttgctcaattttcagagaaatggaatgctcgcatcactgatctacgtaaacaagttgaagaattgtttgaaaggaaatatggtatgtctaaataggaaaattcctgtaatactttgttcatgagcatttacacaatggcgttactgttcatcatgggggtgatgtggacaagcccagcccagggctgccagtgaaccgtgccacactttcttacacgtctctcattgtaaggtccttagtagtgtctgtctaaatattagaaacagtctttgtttctagattacagtaaagctaaggaaaagttgtatttctgtagttatcagctaacatttcttttaaacttccagcatggatatttgggaatttatttacatatttattacaaagctctggatcttgggggtttcattaaaaattatttttttaactgatagtttctgttaatctactttgttaaatccagtatttgctgagatccccctattgtctctacttttatcttttttttttttttgagacggagtctctgcattgcagtagtacgatctcggctcattgcaacctccgcctcccgggttcaagcaattctcctggctcagtctcccaagcagctgggactacaggtgcccgccaccatgccctgctaatttttgtatttttagtagagacagggtttcaccatgttggccaggcttgtctcaaactcctgacctcaagtgatcctcccgccttggcctcccaaagtgctggcattacaggcgtgagccacccttcccggccactgcttttatcttgatgtataactgagttgatgctagatttcaattccttctttgtccttttactattctgtcctatagccacctttatataatgatcaaagaaattcacaatttgttatcatttttattttttataaaatatttaaaatgatttaaaataaaaatcattttatttttatcatatttattatcatctgttatcatttttatttggatgactatttactttgccattaactagcaagcggtaaaattgtatgatatgcagttttaactgaattgctataagtgaaaatttaaatgcaataaaccatattgatggtatttgtgttaacaaacttaaaatgagcattttttcttcatcatgagtaatataacctacccctcaatgaaaatctacaattagagtaaatttgctaatgaattcagtaacttttccatatttttagtggtttacttaaggttctcttagtgtttctcccagtttttaatagcttacaccttttttgcccgtggttttttgttttttgtttttttttttttttttttttttgagatagagttttgctcttgttgcctagtctggagtggcacgatctcggctcactgcaacctctgcctcccaggttcaagcaattctcctgtctgagcctcctgagtagttaagattacaggtgcccgccaccatgcccagctaatttttgtatttttagtagagacaaggtttcaccatgttggccaggctggtcttgaactcctaacctcaggtgatccacccacctcggcctcccagagtgctgggattacaggcgtgagccgctgcgcccggcctcatgttttctattggttcattatgaagcaaaaacttcatagcatgtgctacctggaagcactgtgacctagtggtaagatcataggctctggggacacagtgccttgccacgtctcttctcctgtctgagtcttagtatcctcttttgtggtcatgagaactgaagatctatcctggagattgataagatagtaaagtgcttcacgtaatacctggcatacatgtaataaatgcttcctgtgtgtatatatatacacacatatacatatatatgtatatgtacatatacacatatacatatatatatatatacataaacacatatacatatatatataacacagtgaaacccccgtctctactaaaaatacaaagaattagctgggcgtggtggcgggcacctgtagtcccagctactcgggaggctgaggcaggagaatggcgtgagcccgggaggcagagcttgcagtgaaccgagatcacgccactgcactgcagcctgggagacacagcaagactccatctcaaaaaaataaaaaaaaagttaaagagcactacagattcaatgatttattattcttttctacaaattgtgtttaaatgatatctctttctctttttgtccttatagctcaagccataaaagccaaaggtccggtgacgatcccgtaccctcttttctagtctcatgttgaagatctttatgtagaaggacttcctgaaggaattccttttagaaggccatctacttacggaattcctcgcctggagaggatattacttgcaaaggaaaggattcgttttgtgattaagaagtaagactcttggattcctgttgaactcttgtctcttttctgagtaatacgtcttttttattgttgaccaatattcattcaccactagggttctatgtgatgaagtttgagttattttatgtatttttatcttgcactttttaatttatctgggtccagcattgcatcagtcatgcagtgttggcattcgaagcatgaacagtgcccgcactggattggcatgcaactcacattttctttcacaattttctgctacttttgctaaagaacatagaatccacgccttgtttttaggcctgatatatatatatatatatattttcgagatggagtctcacactggaacccaggcttgagtgcagtgtcgcaatctcagctcactgcaacctctgccttccaggttcaagcgattctcatgcctcagactcccgagtagctgagattacaggcgtgcgccaccatgcctggctaatttttgtatttttagtagagacggtgattcaccatgttggccaggctggtcttgaactcctgacctcagatgatctgccaacctcgccctcataggcctgagatttttaaagcatgcgtgggaatatatgattgtttttatagatgtgcagaggaagatagtcttgaatgcaatatgacattaaaggatcccatttaagatttttgtaatatgcttcaaagacctgtgggttgcaaagttacctctttacttgtgaggatacatgctccatgaagcaccttatgagacaacttgcaattattagtttgctttttactctgtagaaacctcaaattaagatttagttgtgggctgggtgtagtggctcacacctgtaatcccagcactttgggaggccaaggcggctggatcacccgaggtcaggagttcgagacaagccaggccaacaatggtgaaacactgtctctactaaaaatacaaaaattgaccaggtgtggtggtgggcgcctggaatcccagctacttgggaggctgaggcaggaggattgcttgaacccgggaggtggaggttgcagtgagtcgagactgcgccattgcactccagcctgggaacaagagcaaaactccgtctcaggaaaaaaaaaaaaaaaaaaaaagatttagttgtgctcaagcatccagattatcttttcttttcaaaaccagccttactgactaaatgttaaatatgtactagtcgttattagtttgctgaatattacctagtgattattgagtatttattctcacctttcagacatgagcttctgagttcaacacgtgaagatttacagcttgataagccagcttcaggaggtaggtcttcaatctcgaggcagatcagaagattatgtgcaataattatttcacgcttaacattgatttcttctttatgttaccttccacatgaaataatatgtctctaactattaattatgtgccattacaggagaattcatgttgtcaaaattctaataatttctagaagaataaacgcatcttctttttattaacccattgtaaatacttataaatattgcatttatgggtagacagaagtaaaagaacaatatttgttctacttttgatgcaagatttatctggcataatgcattgaacagtttattattgaagtctacacgagtcaatggaacaagcattcattgaatgtccatgatatgcaggacataagaaggtttccttttagagcatggagccatttatatcatctcttaattgttagatgtattttgttttgttttgttttgttttttgagagggagtcttgctctgttgcccaggctggagtgcagtggtgcgatctccgctcactgcaacctcccgcctcctgggttcaagcaattctcctgcctcagcctccctgtagctgggattacaggtgcctgccaccatgcccagctaatttttgtatttttcgtagagacagggtttcactatgttggccaggctgatctcaaactgctgacctcaggtgatctgcccacctcggcctcccagagtgctaggattacaggcatgagccaccgcgcccagcctgttagatgtgttttaaaataaatagaaatataattgattttcttgcttgcttttgctctggagtggagtggagtgaggataaaacagaatggaatcaccctgttgatatttactaagatagaaggactgcagcaagatcatagccctaatcttcctgtagcaagtgttacctgctagctgttcctgaatacactgagttttgctttttcctagctctaatgaatgtttcgttcttcctctttttgtacagtgtcagcattgttttagaaataaatacattctagaatcttaggaataattttattattgtctttttttttttttgagacggaatctcattctgttgcccaggctggagtgcaatggcgcaatctcagctcactgcaaccgctgcctcctgggttcaagcgattctcctgcctcagcctcatgagtagctgggactacaggcgtgcgccatcacgcctggctaatttttgtatttttagtagagatggggtttcaccatgttggccaggctggtctcaaactcctgacctcaagtgacccgcctgcctcggcttcccaaagtgttgggattacaggtgtgagccattgcacctggccacgaatcttagaaataattttggccataggaaaaggaaaagttatacctcttattttatagtaataatgtttaataatcaagttattaaacccattaaattgagaacacttgtattactgttattttgacagtaaaggaagaatggtatgccagaatcactaaattaagaaagatggtggatcagcttttctgcaaaaaatttggtaagtctgttttttttaattaccccttcaactaaaatgtattactgagtaacatttttttaaatgttgttttattttaggaaagtaaatacagtgaataggactcagctttagttttccctgttttttttttgggttttttttttttttcttgagaaggagtcttgctctgttgcccaggctggagtgcagtggtacgatctcagctcactgcaacctcctcctcccgggttcaagcaattctcctgcctcagcgtcccaagtagctgggattacaggtgcccgccaccacgcctggctaacttttgtatttttagtagagatggggtttcgccatgttggccaggctggtctcaaactcctgaattcaggtgatccacccgcctcagcctcctaaagtgctgggattataggcgtgagccaccgcgcccggcccccattctatgaattatctgtggaaagttatttcctttaaaatggcatgctcgtgaggttgaaggggtaaagaacattgatctggttgccacgcagatgaaagtgtagtcggaaatgtgttaccagtttgccatagccgatggaggagggtaattacggtcctgaacagttagtagcaaaaggctgcttccagatagtatttaggttgtgtcctctattgtccatgatgattttctttctctcttttcttcctaaggatattgaaaaacaaactttaatcttttaaagatctcagagctattaagattgtcttaggaccaggacacttaaatctgcccaaatctggctgttgatgatcggtcatctctacttgtctttgctgtattaagtctattcaatagttaataaatatgtttctagaaagagtttttttcaagtaaaacaaaattgacctgtgcctttctttggattgtactaaaatctgatttcaatacaaatgtagtctcccgaattgctttgatttttgtccagcggaagccttggggagcactgaagccaaggctgtaccgtaccaaaaatttgaggcacacccgaatgatctgtacgtggaaggactgccagaaaacattcctttccgaagtccctcatggtatggaatcccaaggctggaaaaaatcattcaagtgggcaatcgaattaaatttgttattaaaaggtaagatgataatctgtagaaatagtttcagtgtcttccctgagaagaggttaatttgatgaagaagggccttttgtttaccttatgacttatttctattgacaatgaaggcattaatatttagattcacttagtgaacaaatattagtataagcatcagatgtgcaaaattgggtctaacaagaacactgtccttggggccttcatacaaagaaaaatgcactgaaggccgggcgcggcagctcacgcctgtaatcgcagcactttgggaggccaaggcaggtggatcacttgaggtcaggagttcaagactagcctggccaacatgatgaagccccatctctagtaaaaatacaaaaattagctggaagcggtggtgcgagcctgtagtcccagctactcgggaggctgaggttggagaatcacttgaaccctagaggcggaggttgcagtgagccgagatcgtgccactgcactccagcctgggcaacagagcgagactccatctcaaaataattaaaaaaaaaaaaaatagaaaaatgcaacgaagtgttattgagcgtttttaagggagaaggcaaggatggcacacctagctcggtcacttgtgcatccagaagagatggaaggtgtttcaagtgaaggaaatcatatgagtagggggaggaggtggcaaatatgcctgcgtatccacagaactcacccaccgtgtgtggagtgaggactgccacgtgggcgtggtggggttgcatggatcgacttgggtgggcaagtggaggaaggcctgagatcctacgaacacagaggcagtcacgaagtggtctcgaggcagatgcctctgaaaataatgtggatccgccctttagaaaggtaattctggcttgattttgaaggataacacaatggttagtttgggtgcggggttaggaacagaaggcctctctccactcattgacgggatgtggaagggtaaaccttccttactgattggggtcatgcctctgtgtgtttgttgggactgagttataagggataggaaacgtttaagatgctacagcgagctgcttctggctgtgctgtgggacagttcatctaagattcagaaacagaattgagctggtttgggggaaaagtgactttcgcctgtttatcttaaatataggatgattttgaaggtctcacccgaatatctgaaaattgccattttcaaaataaactcgtcaccaaaatgatttttttttcactataaaatgaaggcaggatgaaccatatttataactaattggcaatgaacagctggtgagaaaggcctgtgagttgcttctaaatgctttattactaatatcaactctgtttctacagaccagaacttctgactcacagtaccactgaagttactcagccaagaacgaatacaccaggtaaactagttgtgaaatccttttttaaaaacacagatcagccaggctcggtggctcacacctgtaatcccagcactttaggaggctgaggcgggcagatcacaaggtcaggagatcaagaccatcctggctaacatggtgaaaccccatgtctactaaaatacaaaaaaattagccgggcctggtggcgggcacctgtagtcccagctactcgggaggctgaggcaggagaatggcatgaacccaggaggcggagcttgcagtgagccgagatcacgccattgtactccagcctgggcagcagagcaagactctctcagaaaaaaaaaaaaaaaaaagcacagatcaatactttgtaagcttttaaaagttaatcttttaaaattatggaagtcccccttcccctgcctccccaaaaaatcatttgcagaagctcaatccagccactccttgatttatcaatgtgaacacctgcagtgcacagataactcaagctttgaccgtagaccactgctatccatgagaaaggcagtgtgccccacaaatgcaagccacatgtgtaatcgtccacgttctagttcagcctgtaatcattataaagaaatacacagggaagtatttcacggtctttatcccatgttctttatttgacagttggcgcgtctttcatactcacagcatatttcagttccaagtagccacatttcaaacatttcaactgctcggggatagtacctgctatatgcatttagaccttaatgtttattcatatgtatcgtgttcctaaaatggcaaagactgtaactctgacctgcacacaaatatcacagcctaatagggaagatctaagaagtctctgttcaatgaatgatgttattttctttattagagctctaagtgtgcctttatttctttcctatcttttttttttttttttttttttgagacggagcctcactctgtcatccaggctggagtgcagtggtgcaatctcggctcactggggcctccgcctcccgggttcaagcagctctcccgcctcagcctcccgagtagatgggactacagctgcacgccaccacacctgggctaatttttgtatttttagtagagatggggtttcaccatgtcagtctggctggtcttgaactcctgacctcaggtgatccacctgccctggcctcccaaagtgttgggattataggcatgagccactgcacctgacctctttctttttgtttgccgttgtgtaatgtcagaggaagtgaccacactctgtagatcatcagccaccttaggaacttctgttgccaagaaccaataaatgcccataccctgtagtgtgtaaatgcccataccctgtagtgtgaagttttctgttgttagaaataagtgttaggaatcaagtatgaaatttgtgtgtgtactaggtgtatacagattggtgcagttaatcatgctcacgactactaaggtgaacaaatgtttcaagttgggttcctgggtgtgccctaaaatacttctccttcagctctcacagcaccttgtggacatgagtgaaggtcagtcagtgtgccaaatagattttgtgtggattatggcatggaaagtggctgagaaattctgtagcagggtaacaaaattatcttggtccaggagtcctgtagtggagaagataaaagtcaatgcttaactcataggttaacctcagcatgcttttgatttggtcaagcaatcaaagtactggtgaagaattgaagattggaagtgacacattttttgctcagggaagtaatggagaaagaaaaatcttcctggaggtagatcttcagtttggattagtctgaacatgatgaaacctgtagaaaccttcatttctcaagacaaagctcaaattcaaggttgtgaggaatgcagtcaccacttttgttaggggcagttgtgacagtgagtgactgcaaaaactgagaatgcgaagcctctattgtaaaaagaatgtgcaagtgccatagaagtcactgcaaggattgggtgctggagcagtgccggacctgccatcgtcaccagagtgcagcagattcaccagaaggagaatctccactcttgtcgtcactaacagcacttgactttgtcccattcataaaagatcttggaaggaattaaaggtgcttggtggttcctcattccaacaacaccttacttggcctgcccgtggaacatgcgttagtctttggacaggacaactcgagtcacagaccacaagagaaaagaattttgtggccatcagaattgtctgcttaaacacaccacgggtgcacagtgtcctcagcttggtgaaagggagatgtcacacgcgagaaggcagcggagccaggcatgtgatggagtgggaggtggcacctggctctgtgaggaggctgtgaagtcctgcatgggaggagcaaggtgggggaggagggggtgggggtggggcagaagaggaggctgagcagttaatagaggcgctcgaccttagaggaggagagtccgaggtctttattggtagtattcaaatgtggttcatccagagttattttctgtggctgaatggcctactctgaaatccacagggaaaaaacaactcacattcaacccttgagatgctaagttttcttttaaagtaaaggaaatgttataagattttctgaaaccaccaacctttagcgatattgtcagaccttctccaacattttccactgcatttgtcagcaatcagagatgacctccacaccgaggcgaaccctccaccccccgacccgtttcctctttctctctttccctcctttgctcatccagaaacacttcagtcatcctgcattgtctccaagttgacctccctcctcatccgcaccttgtccacacctgaatactctgtccacatcagtgatattctacatgtctttataatagcttttttgtttgtttgtttgtttgttttttaaattttgatgcttaaaaggcaatggttgtcttagggataggaaaacacaccccactgtcactgtgagtgaagctgaataacgtctctaggtcttttaccattgctttcttttttttctgaagtgatttttccttttatgtccattgctttaagccattcgtgaaattgcacagtgatttctggagtggggacagaaggaaggcggtagtaaaagtcattggtgctgtggcccagttggctggaggaggtgcagggcagggcggcctgcgctggggcagctggaggagcacagatgtccccacgggcaggtggatgagttctgagagctggagggccggtacagtgtcctccatggttccagcttgtgggcttgatcaggccgtcacctgcggtggccactgagctggcgatgaactccgtggccttggagtcgccctcggcagagatgatggccgccgtcttctgctgctcagcccttgccaccacagatctggccctctcttcttcctgctgagccacctctttggttccactgcttctgcaaattccttcccgaaggtcagatccaaggtcacagcatccaggaggaacccaaaggttgctgcttgctccgaagttaattgctcacctgtctggagcccagctctccctgcgtgatcagttctccagcgtcagcctgagccgcccccagcttgaggagctccgcagtgatggatggcagcacattcttcattggcttctccagtaattggaagatgcaaggacctggccagcaacaaggcgggaagaggacgcccagtgtgatggtgacaatctttgctcacagtgatgattggtgcataatgtggtcaagagcagcagtcaaaaataattggtttcttttcccatgggatgagaaagtgcgttccttcccctatcacagtgtcctgaatgccatggaattggtcgaagatgacagacagctctctgtgcagcatcacattgtagaaggcagagttccccacacctcctgcagaagctaaggacagggcagacttggcagctgtgtttccatctgctggacccactcacgcctgcgtccactccaaccccccacatgaattccgtccctttatcattgatttctgatgcgaaaagtcactttgattagtgaagtgttgctttatgtagatttttaggcacacatctgttagataaaacgaggattgcctgtagagaaagcaaataaaagcaaagtccctcttgttgaaactggtgtgggagcccttgaacctcatgcagctggcctccctgctctgaccgagttccctgagggacttctccaaggaggaatgtgtgagaagcactgattttgagcactctttcatgtggacaaatttcactttatttacaatgtaaacttaaatttaaattctgtctttctaggctgggcacggtggctcacgcctgtaatcccaacactttgggaggccgaggcgggcagatcacttgaggtcaggcattcaagaccagcttggccaacatggtgaaaccctgtctctactaaaaatataaaaattagccgggcgtggtggcggctacctgtaatcccagctactcgggaggctgaggcaggagaatcgcttgaacccaggaggcggaggttgctgtgaactgagatcacgccactgcactccagcctgggcgtcatagcaagactctttctctaaataaataaattaattctgtctttctgcagtttttctgatatttggcaagtactggaaattattattttccttaagaccccaaattttcacaccaacatggcacatgtatacatatgtaacaaacctgcacgttgtgcacatgtaccctagaacttaaagtatgataaaaaataaataaattaattaatttaaaaaaaagaccccaaatgtttgcttttaacaaaactgaattaagagaatcactgcaggccgggcatggtggctcacgcctgtaatcccagcactttgggaggccgaggcgggcagatcacgaggtcaggagatcaagaccttcctggctaacaccgtgaaaccccatctctactaaaaatacaaaaagaaattagctgggcatggtggcgggtgcctgtagtcccagctactcaggaggctgaggcaggagaatggcgtgaacctgggaggcgaagcttgcagtgagccgagatcgcgccactgcgctccagcctgggcgacagagcaagactctgtctcaaaaaaataaaacaaaacaaacaaaaaagaatcactgcaaacaagagtactttctagcaaaatccattctgatttgcaacagcactgataaataacatggttattgggtttctttttgttttccagtcaaagaagattggaatgtcagaattaccaagctacggaagcaagtggaagagatttttaatttgaaatttggtaagtaaaagccagtatttatgtctttaataacatatcaacaaagggccatgtctgaatgaagtatagaagttcgggaccagccgggtgcagtggctcacgcctgtaaccgcagcactttgggaggccaaggcgggcggatcgggaggtcaggagatcgagaccatcctggctaacacgatgaaaccccgtctctactaaaaatacaggaaaattagccgggcgtggtggcgggcgcctgtagtcccagctactcgggaggctgaggcaggggaatggcttgaaccccagaggcggagcttgcagtgagccaaaatcgcaccactgcactccagcctgggcgacagagtgagactctgtctcaaaaaaaaaaaaaaagaaggaaaaaaagttcaggacctaaagaaggaaggtcccagaaactgggtttctgtttctttctaccactacacttgctactgaaaccaagcagatgacttcatttctcttggattccactttctcacgtgtcagaatgggagaggaagggaggtgttgggataagtttcagttccactgtttgtacttctcgtctggctaacacccatgtggcaaataggtttcatcatttgtttcagcttagatttgttgacagcggtttcctggagtgctgtcttgagaacgattctgaggaggctcagcaagaaagagtgtttcagttgattgggtgtgtctgtcatggagaaggaagtaaggagtgggcagtgctagcaaaattcccggggcacttctgtccattatctcaatacctggggttgacatttcctgtctcagatcaggagtcctgactaccctgcctctgaccactcgaactgagtgctgcttagctgtatcgtagacaccgcctgtttgtgaacagacaccctgcttcttgataacacaaaggccagcagggtccactgctgtgtggaatggccttcggtcatttctgcccagagcatagaggtcattttcactaataacataactctccttttgattgaaagtgttaaaatgttcctcctaaaagcacttattttttaggctcgttcttcagatttgccccatatcctaagcaaaatgccttcaatatgaagtggatattgcttgaccgtagggagcttgtccatactgtactcgagaatgtagacacaaagaaagaatgtctgtgtcaaatgttatcctccgcaacttaacgttctcttgcactttcagctcaagctcttggactcaccgaggcagtaaaagtaccatatcctgtgtttgaatcaaacccggagttcttgtatgtggaaggcttgccagaggggattcccttccgaagccctacctggtttggaattccacgacttgaaaggatcgtccacgggagtaataaaatcaagttcgttgttaaaaagtaagttctttttgccactgtagtcgtttctggaatcaaaacaataaaatgacatttctgttaagatgtttttcaagctagaggtgacaggcgtggctgtaagtccttgatggcaaagcctggctgtgagctgcagtccgggtactgtccattgcccctgcccatactcaatcatcttcatccgtgcaaggaaaatagtgacaatcgcctccgcggagtcaccgtgaggccccgtggtgactcgcagtatgcctgagtacttgaatggaagtttaatttgctggtttttatctgctctgttattcctggtcaatcttgagagcgactaaatattgatgattgagtttctttcttttttttgagacggactcttgctctgtcgcccaggcttgagtgcggtggcgcaatctgagctcactgcaacctccgcctcctgggttcgagcaattctcgtgcctcagcctcccgagtagctgggattacagacttgcaccgccacgcctggctaatttttgtatttttagaatagatggagcttcaccgtgttggctaggctggtctggaattcctgacctcaggtgatccacccgcctcagcctcccagaatgctgggattacaggcatgagccaccgtgcacggcctaatgattgattttcttatctacatttctgcagaattttagtggctaaagaaagtacactagtgttttttttttcttttttaatgaaaatagtcacttatttactcttcataaaatggcttaccagtcatgggaaggaaaagtcagggtcttttgtccacaacactaggaattattgtgttacaggatgattctgtgaatgcctttagaaaaaaaaaccctgatcacatcacgaccgttttactagctgtgaggccaccactgtactggctactgtaacacttcttggttttctttctagacctgaactagttatttcctacttgcctcctgggatggctagtaaaataaacactaaaggtaagagactacgtgtactccgtatcctatttgagcgcattaagacactctttatccgcattccttaaatcatacggaatcggccaatatctctgtggggcttggagttgtttactttgctttctaaggtattttatttaatggaactatttttctttttttttttaaaaaaaacaaaacatttcattggaaatgtcacatttgcaatcccagttcattcatgttttcacagctttgttgagcccctgtggaggattacactacaagtttaattctgcaggtttctttgaaaagaaccaaactgtatgaattttaatactctgctcttataaagcatctccttctgtatttttttttccctacaatatacaaaaggaactctgcttattttacagctttgcagtcccccaaaagaccacgaagtcctgggagtaattcaaaggttcctgaaattgaggtcaccgtggaaggtaagggccagtcctcggtatgtttctgttcattctctagtttactaattatgtcagttcactagctatgtgtttatacaggtttatacagatgacgttaaccaaactagcttttaactgtgaacagctgcctgtgataaagctaaatttctgaatgcttctaattgaaaatttttaaatccttaatagaaaacagataacatggatcacatcataaacttcccccaagaaaagtcctaaaatgcttttcctttatcataacaaataagggtgcagagtcatgtggaatgttttatcttttttttcctcttcatttttttctattcttttaaggaaagaaagtttagggtggtttaaacagcagtgccttgaataaaagtattttctttttcttttttgagacagagtctggctctcttgcccagggtggagtgcagtggcacaatctcggctcactgcagcctccgcctcccgggttcaagtgattctcctgcctcagcctcccaggtagctgggattacaggcgtccaccaccaactccagctaatttttatatctttagtagagatggggttttaccacgttggccaggctggtctcgaacccctgacctcaagtgagccaccacgcccagctggttcttgtcttttcaggctcacagtgttaaaatactgcatacaatactaaagacaatctccaaccaactgtcaagtatggatatttcttccatctcttcataaatgcagaaggaaatcactgcattaggatcattctctacatcccaggtgtcaagtttttaaataagagtttgccgtactggtgttgagtggcgcagaagtccctatttagtcatgtggcacactttcagagagcctgctttctcataagatagccaacaggcatccatggacaacttacacctgattaattatttctgttcaaaaatgccaagaattaaaaatatattgaacccttgactttcctccttccggaagagatcagaggaagatctctcttatatacaagatgccagcctttcctaaagggcagagccaagttcacggggcctgggaggcctgctttaagaatacaaaattagggccaggcgtggaggctcacgcctgtaatcccaacactttgggaggccgaggcaggcggatcacctgaggttgggagatcgagaccagcctgaccaacatggagaaaccccatctctactgaaaatacaaaattatctgggcctggtggcgcatgcctgtaatcccagctactcaggaggctgaggcaagacaatcgcttgaaaccaggaggcagaggttgtggtgagccgagattgtgccattgcactccagcctgggcaacaagagcgaaactttgtctcaaaaaaaaaaaaaaaaaagaagaagaagaagagaagaaaaatgggtttctgtagaaatagaaaaatggtttctgtggaactcgccggaatgacaagaatacccatttcaatttgaacctagctttgttttctggcacaggctggacttgaagattgtaacctagagacacttacgtcattaaatgtgtgttgattatcattattttttctgtcttttaggccctaataacaacaatcctcaaacctcagctgttcgaaccccgacccagactaacggttctaacgttcccttcaagccacgagggagagagttttcctttggtaagtaagcgttttatttttctttctttcatagttttaaatagaatacgttcattatgtttcattttaccaggtgaattgttcctattggtgagtcagtatatatcaaaggttaaaggaatagcccgtagagccaggctgcctgagttcagatctgagttcaaatccgatgccacttgggcaggcgaatacaccctgcctcagtttccctttgtgcaaaatggtaataacattactttctttctcatgaggttatggtgaggattataaatactgtcatttaaagtacttagaaccatacctcgcatgtagtagagactataatttgtgggggcattttgggggttttcatttgttttttctttattttagcatttgttcacttatttgtagtcaacataaaaacaatgtactaaaacagtttgcttatgtatcaggatgggagtagttgtcaagtcatatcatggtaaaagattatgcattttttatttcttcttaaagatgcacaaataaggccaggcgcagtggctcacgcctgtaatcccaacactttgggaggccgaggtgggcggatcacctgaggttgggagttcgagaccagcctgaccaacatggagaaaccccgtgtctaccaaaaatacaaaattagccaggcatggtggcgcatgcctgtaatcccagctactcaggaggctgaggcaggagaactgcttgaactcaggaggtggaggttgcagtgagcagagatcgcaccattgcactccagcctgggtaacaagagcgaaactctgtctcaacaaaaaaaaaataagatgcacaaataagatgaaacactcctgcctgtgaatgtgtattgataagtactgtgataagtattgcaatttaactctcttatgttttatatgcagaggcctggaatgccaaaatcacggacctaaaacagaaagttgaaaatctcttcaatgagaaatgtggtaagtctattttgaaaccttcttactgccacgcagggtgccttcatgggagtaggagggagcagagtgggatactgagcgttggagtatccctgtcattggcaacgtgtgggtttttcgggattgaatggcgtcatttcgcccatgttctgtttcgtgtacgcggctgttttgcaggggaagctcttggccttaaacaagctgtgaaggtgccgttcgcgttatttgagtctttcccggaagacttttatgtggaaggcttacctgagggtgtgccattccgaagaccatcgacttttggcattccgaggctggagaagatactcagaaacaaagccaaaattaagttcatcattaaaaagtaaggaaactggatgaagtgggattagcatgagttgattgtgtttgacactgggagatgggtatgtgggtttgtgtttgtggcagggctgaattagctctggagtcagaaaaactgctttttaagctgcactcttgtatatgtttaaaacttctggccaggtgcgatggctcacacctgtaatcccagcactttgggaggccaaagcaggtggattacctgaggtcagaagttcaggaccaacctggccaacatgatgaaacccatctctactaaaagtacaaaaattagctgggcgtggtggcacgtgcctgtaatcccagctacttgggagactgaggcaggagaatcacttgaacccagcaggcagaggttgcaatgagccaagatcgtgccactgcactccagcctgggcagcaagagcaaaactccatctcaaaaacaaaaaaaaaaaaaaaagaagaagaaattttccttatgctgctggtagaagggaaggaggactccaccatactagagagataacgacttttagttgctaaatctacacagctatgttgttactatttgatgctgctggaatctgagcagctgtttagtttttcaagtccttttatttctccaacttaatagaatattttcaatttctcctgtttgcttgaacatctgtggattaggctaacataattgaaatagataggaatgggccgggtgcggccataaatcccagcactgtgggaggctaaggcaggcagatcacttgaggtcaggagttcgagaccagcctggccaacatggtgaagccccatctctacttaaaatacaaaaaaaaaaaaaaaaaaatagccaggggtggtagctggcacctataatctcagctactcagggaggctgagacaggagaatcacttgaacccaggaggcggaggagatcgtgccattgcactccagcctggatgacagagtaagactctgtctcaaaaaaaattaaaaaaagaaataagaataattggaattttatagtacatgctaatgcacatgaattatttgaaatcaattgaaatgaattttaggtttcatttgcttggtgtcaggcttaattttgagtcacccagggatgctctcaagcaaagctggccactttttttttttttttttttttttgagacagaatctcgctctgtacccaagactggagtgcagtggtgtgtgatatcggcttactgcaaattccgcctcctgggttcaagcgattctcctgcctcagcctccaaagtagctgggattacaggcatgtgccaccatgcccagctaatttttgtatttttagtagagaaggggtttcaccatgttggtcaggctagtctcaaacccctgacctcatgatccgcctgcctcggcctcccaaagtgctgggattacaggcgtgagccaccgcgcccggccaatggccaccttttatgcttttggccaggtctgcagaggtttggcagcctctaagccctctgcttctgcttccggagtgagagcctcaagtgctcctgttttcacagcccatcttgtgtttccatgctgcgtttgtggggcgttttctctttccatcctcaattctggcgctgattcttttcaggatacattctaaccttggaaagaagatgccaataaaaccagtgtaggggaagggcagccaatgagaggcagcaatggatgttaaatttacaattgtggtttgtctttttggctgtggttctttagataagcatgtgatttctgttcttcatgactaagaattgaatttagactttacagagttactggtttgtaaatctttgagttgtttaaattttaatgttagagttttactgtttgatcagcacattttttttctcttttgtctataggcccgaaatgtttgagacggcgattaaggagagcacctcctctaagagccctcccagtgagtgtattttctgtattttcattgctatagaacacacgctcttaggcatgcattgtgcagctgtggtttacaaacattgtttaaagaatagccattgaggccaggcatggtggttcacgcctgtaatcccagcactttgggaggctgaggtgggtggatcacctgaggtcaggagtttgagaccagcctggccaacacggcaaaaccctgtctctactaaaaatataaaaaattagccaggcgtggtggcaggcgcctataatcccagctactcaggaggctgagacagcagaatcacttgaacccgggaggcggaagttgcagtgagccgagatcgcaccactgcactccagcctggacaacagagcaagactcatctcaaaaagaaaaaagaaaacccattcaaagttgtagttcaggctatttcacaatttttagttatttaataattgggtggctctgtgagtgtgtgatgatctcctaagtacccccaggaagagaaaaacagtgaaaggcagcccttcagggggcatcatgtcttcttgaaatgatctaccatggaaagaaagaaccttgaacaggactgagataaaacagtctcagacagcatgattattagagatgttgaccgtgttttctacaaattctgattttaaatgtatattttcaggaaaaataaattcatcacccaatgttaatactactgcatcaggtgttgaagaccttaacatcattcaggtgacaattccaggtatgatttctctgcttccatcagagtttttgggggtctcttcagggcctcttggactttcccaactagagaggtttgctcagctcatccggggactcggatacattacacgttgcctggtgctcctcccagactcctacagcagttgccttccaaatacagttgctctccaaacagcaacggcaagttttggcacttggcatgagctaaatcctgttaaccacccaaatgtctagtctgttccttaaaaaaagtctatatgagaccgggcacggtggctcacgcctgtaatcccagcactttgggaggctgaggcaggaggatcgcttgaggtcaggaattcaaaaccagcctagccaacgtggtgaaaccctgactctactaaacatacaagaaaaattagccaggcctggttgtgtgtggctgtaatcccagctacttgggaggctgaggcaggagaagtgcttgaacccgggaggtggaggtcgcagtgagccgagatggggccagtgcactccagccttggtgacagagccatactccatctgggaaaaaaaaaaaatctatataaaacagcaggtaaaggtctttataacaagaataaatttgtagcatttttagttaggcattattttaaacaatttcaaatttaattagctcaaagtgctcaaatacttaaatcattaaaaaatggaaaatgcttgaaaacattacacagagctcctaaaaattgggattaaaagtgcatcattgagcagcggcttgtacctgtagtctcggctacttgggaggcttaggcaggaggatcgcttgagcccaagagttcaaggccagtctgggcaacatcgtgagataccatctctttaccataaaaaaaaaaaaagtagtatttaagttttgggttttctctgaactgtttcagatgatgataatgaaagactctcgaaagttgaaaaagctagacagctaagagaacaagtgaatgacctctttagtcggaaatttggtaagttttgcatttgcaaagtacagttgctataagcaaagagatttgttttaataagatcttttcagcagatgatggttagatggttgtaatcctatataaaaggagttaaaatttaaaagtgagttgtttgtgctaaatttatttaataagataccattagtgttacactattgattgtcagtatgaaagttaatgaatttaaggttcaccatctggcagtgtggctcacacttgtaatcccagcattttgggagcccgaggcaggtggatcagttgaggccaggagttcgagaccagcctggccaacatagtgaaaccctgtctctactaaaaaattcaaaaaattagccgggtatggtggtgcacacctgtaatcccagctactcaggaggctgtggcacgagaattgcttgaacctgggaggcagagattgcagtgagctgagatcaagccaccacactccaacctgggtgacagagcaagactctgtctcaaaaaaaaaaaaaaatttaaggttcatatttaaatttgtttgaagtgtacaaagaccttagttaacagcagagacagtctttaaaataaatgttgatcttgtgcttttgacaggctgtttaaggcggtgggttaatctgtgctgttgtgctgtttgtctcactgtccctgtaggtgaagctattggtatgggttttcctgtgaaagttccctacaggaaaatcacaattaaccctggctgtgtggtggttgatggcatgcccccgggggtgtccttcaaagcccccagctacctggaaatcagctccatgagaaggatcttagactctgccgagtttatcaaattcacggtcattaggtaagtgagagtttcctgcttagtcacaggagcgaatctggagctcatgaggctgactcttctaaaatgcagccacaggtagtcatcgaatccggcttcctatgctgtgcaatcaacaaatcaaaataacttgtgtcatcattagaatgtcagatgtgcttctacgaactaagctgactcttttaattctttggcaaagggttggcaaactaggactgtttgccaaattcaggctgcctcctatttttagagtcttcctgaaacacagctacacccgtattatccatggctgctttcctgtcacagtgagtaagtagctgggactgagaaggcatggcctccaaagtctaaaatatttactctctagcactttgtagaaaaaccttagctaggcacagtggctaacgcctgtaatcccagcattttgggaggccaaggcaggcagatcacctgaggtcaggagttccagaccagcctggccaacatggtgaaatcccatctctacaaaaataaaacagttagctgggcatgatggcgggtgcctgtaatcccagctactcgggaggctgaggcaggatagtcgcttgaacccaggaggtggaggttgcaatgagccaagatcatgccactgcactccagcctggacgacagagtgagactccatcacaagaaaaaaagaactttgtcaacctctgtcttagggcgccttgtcacaggcttcgggtcagacggattcaacctcgcatcagccatttgttagccaggtcactctgttctttgtctgtaaatgagattgatcgttgttcccactgagagtgtcagctccttcccatagagcaggcatgatgattgtactcacctctgacaccattgtgagtgccacattccttcccacgtccttgtcaccgtaagagatgcccacctgagcaccaaccccaggttatcttcccctttgtcttccagccccccagaaacagctacgactcaacctacccaatcatttcatcatcagattgccactgtctctagttcaggtctcttgggactggcactcagaaatctcataataaatcctcttgaggcttctcatacactcgtcttcttccaatcttctttccctcaaaatctcatattttggttccacttcacccacggtcattctccatatcactcccaggagttaggcaaaaagccccttccgttcttccgtatgttaaacttagaatcactctgttccctgctctgcgtttctattttttgtttttcctccatttactagtagcttaacactttctaacagtgttcttattattgatacgtatctatctcttccataagcttataaggtcatggataatacttctcattgtagtacgtaaatgacgtgggctagatatgagttgaataaacagttatacctgtaaattcttacagagtgaaaataaattgttatactttacaatttgtttctctctttagaccatttccaggacttgtgattaataaccgtgagtattttgtgaagtgttttgtttttgttttttcctggggtctgacgtgtgtgcgtgtgagtgtgtatacatgcttaacgtatatcacgttacttcacctatgtcagtaaccaggccaaatacttgttttagccctcagtaaaaacaccaggcacttcctagttgtaaaattattcaagcttcttaacttcctatcctcgatgcacttaatcataaaatggtaataatagcaccgattttgggggagtcgttccagtagatggaaagcatctggaacaggtgtcagcaagctcctgccgacgtgtatgcataaagttttattgaaaccaccatcgtgtccatttgtttatggcagaactgagagatggcagcagcaagtgtgtgcctgcaaaacctaaaatatttactaattggctctgcaagaaaagagtttgcatccccctaacctagaacagtgtctagcctctagtatgtgtttagcctacagtatgtgctcagcgaatacaatctatatttattactgcttttatgactgttataattactgtgcttggatttcgttacaaagtaagtcacaatgtgcctgcttctgttagtatttcagcacagtgcctggcacacatggggctctcaaatattgctgagcgagtgaacaaatgtcctttcaattccttaacgttgatgtcattttcaatagtattttgagccaaacttaattttgcgagtgtgttttgttttcttaactttattattaaaaatgtataaaagtgaggccaggcgtggtggctcacgcctgtaatcccagcagtttgggaggctgaggcaggcggatcagttgaggttgggagttggagaccagcccgtccaacatggtgaaagcctgtctctactaaaaatacaaaaatcagctgggtgtggtggcgcgtgcctgtaatcccagctactcaggaggctgaggcaggagagttgcttgaatcctagaggtggaggttgcagtgagctgagatcgtgccattgcactccagcctgggcaacaagagcaaaactctgtcccaataaataaataaataaaatgttctcttttgttcctgttcttgtgcggtagtgtggtatagagttttatggtaattactgtgaattagtgattctgagggacatatcagaactctgaggtttgtttccttctcatcttgagggaaacagcaaatgtatgttaaaatgcttttccaagggaacaacacatccttacattatttaaaccaatctgcttcattttcagagctggttgatcagagtgagtcaaaaggccccgtgatacaaggtgagcgaggcaggggagggcccggagctactcctgcctgcacagtggcacacatggcgtgcctgcgtgtggctttggctctcagtcacctgccctgaggggactcagttacacagcacacacatgcttctctgtggttttcactcctgggtttgacagctgatcaaaacataaattcaagctgtgggtcctgattgagaactgggggctgcagaccatttgcaccccctatcccagctcaggcctaacatcaggaaccccaggattaatgggtaggatgaaatggcagagcaagagggccgtcactttaacctgactctgccatccatttctaatgtctgccataagtcagtgagcaaaatgttcttcagtagaaatgtacagattgtgctcttaaaaaattccttaaaaaacaagtggaatggcctggtgctgtgtgagtcattgaaagtaatgagactgggcgcggtggctcacgcctgttatcccagcactttggaaggctgagaagggtagatcacttgagatcaggagttcgagaccagcctggccaacatggtgcaaccccgtctctactaagaatacaaaaactagccagacgtggtggcgtgtgccggctactcaggaggctgaggcaggagaaccgcttgagcctgggaggcggaggtcgcagtgagccaagatcgtgccactgcactccagcctgggcaacagaaaggagattctgtctcaaaaaaacaaacatacgaagaaaaacaaaaaaagtaatgaaaagcttttattaaagggagtaaacagaaggataagggagaaagcataactaaggagcttgttttcatggtagagctatgttaagactctgctctttcaaacttcagttgtatatgtgaacttaggaccacatttgaaaaacagaaatttgaaagtacacttggataatcgtgtgctccatctcaagaccgtgagcattgtttcatcatgcacctgtgtttgtacagagtctagagggcttttctcctcttcctcctcctgggttctttacatagtataaagcagctgttgaacaatgtggaaatcagtctctgtgtttctctttagaatcagctgaaccaagccagttggaagttccagccacagaaggtaaaagggtggggtggtcctgcaagtccttaagacttcttctttcttcttcttcttttttttttttttaaagacagagacttgctctgtcacccagggtggagtgaggttgcgcgatctctgcaacctccgcctcccgggctcaagcagttctcctgcctcagcctcccgagtagctgggattacaggcctgcaccaccatgcttggctaatttttgtatttttagtagaaacggggtttcaccatgttggccaggctagtctcagacttctgacctcaagtgatctgccagccttggcctccaaagtgctcggattacaggcgcgagccaccttgcccagccaagacttttttatcaggacaaaggattgtgcatttaaactatttcactagaactgggtggtggttttgctctctttcttctgggtgaattggatttgcaggttatgctgttgagtgatgacgcatagctgcttttgctccattttccccagatgacttggta

SEQ ID NO: 803 - DNA, 190 bp, Homo sapiens
tcatcataatgcagccctatttctttaagcccatacattttgcacttgttaaaagtatttgaacaggccaggcgcggtggctcacacctgtaatcccagcactctgggtggccgaggtgggtggatcacttgaggccaggagtttgagaccagcctggccaacatggcgaaaccccatctctatcaaaaa

SEQ ID NO: 804 - DNA, 270 bp, Homo sapiens
aacatggtgaaaccctgtctctactaaaaatataaaaattagccgggcgtggtggcggctacctgtaatcccagctactcgggaggctgaggcaggagaatcgcttgaacccaggaggcggaggttgctgtgagctgagatcacgccactgcactccagcctgggcgtcatagcaagactctttctctaaataaataaattaattctgtctttctgcagtttttctgatatttggcaagtactggaaattattattttccttaagacccc

SEQ ID NO: 805 - DNA, 244 bp, Homo sapiens
tgctgggatgataggcatgagccaacgtgcctggccagaatatgctgtattataaagaatcttacatgttacttgatgcctgtgatctattttcttagtaagaagagaaacttctctccactcagcctcagtccactgtacccactcttttgtgtgtcaggatgttcaggggagaagagggcttagcatctctgtcctgtgttgagttgtggttgcccgtcactgggctgtaaagtgccttgcc

SEQ ID NO: 806 - DNA, 91 bp, Homo sapiens
ttttttttttttttttgaagacggagtctcactctgttgcccaggctggagtgcagtggtgcaatcttggctcactgtaacctccgcctcc

SEQ ID NO: 807 - DNA, 288 bp, Homo sapiens
ttttgaggtggagtctccctctgttgcccaggctggagtgcagtggcgcgatctcggctcactgcaagctccatctcctgggttcacgccattctcctgcctcagcctccagagtagctggaactacaggcacccaccaccatgcccagctaattttttgtattttttagtagagacggggtttcaccgtgttagccaggatggtctcgatctcctgaccttgtgatctgctcgcctaggcctcccaaagtgctgggattacaggcgtgagctacagcgcccggcctt

SEQ ID NO: 808 - DNA, 91 bp, Homo sapiens; identical to SEQ ID NO: 806

SEQ ID NO: 809 - DNA, 1180 bp, Homo sapiens
gtgagaccccatctctaccaaaaaataactgaagataacactatcaacatcttgggtggttgtgagaattaaatggggaattttatgttagggacttagtgaggtgttgattacatagtgaacctattattcacagaaattcaatggatgttttgaggtgccctctacttgatgcaagcctcagcgaggtggcagtggtggcctctgtccccatggcacggatggtctgttctgctttggaagcactggaagggcacatctgacaattgcaggatggctggtttttattggaggaagggaagctgtttatttgtttcagattggctgagctgtggggatgcgggaggctggcaggaggggaggggtctatagtaaggagactggagaaactctggggaccaggcaggcagccccctggtaagagctgcttcttggaacacaaagagccgttgcgtcctccagccggccttgaggaaggtgtgacttctctgctcccagcaatgtcttgggcacccttctctgccctgcacaccagctctgcctgcagggtgcctggacactctgggtgtctactgtgtccccatatggtgcttgcaagtcttcctcccagactgccccctgcttctgtgtcccctccctggtgcacagcaccacatccagcccccctcccacccagcccacccaggtcctgcccacgtgacccccagtctttctccagtcgcacctcctctgcacgctgaccgccatgtcttgtcctctttttctttttttttgagacagagtcttgctctgtcatcccggctgctggagtgcaatggcgcaatcttggctcactgcaacctccgcctcccgtgttcaagtgattctcctgcctcagtcctccctgggactacaggggtacaccaccatgcctggctaatttttatattttcagtagagtcagggtttcaccatgttggccaggctggtctcgaactcctaacctcaggtgatccacccgcctcggcctcccaaagtgctgggattacaggcgtgagccaccgtgcccaggctgtgtgcttctattctagctccccgactcctgatcccctgactctgaggcctcaggacgaaggtctcatcccctccaggcaggccctccttggcagggcagcttcaatttgtataggaatcaaatcca

SEQ ID NO: 810 - DNA, 440 bp, Homo sapiens
gtttttaggacccagggctggaaagaggtggtgtgggtgtcccctgtaccccgggaccctgtgacgctcacccacagcaacctcgtgtgcatgttacacaggagcagtggccacacggaggccccgccgaggccaagcggtggaggaacagtgacccgtgaggctccctgagatctattggaggagagtgactggctacagtcactttagagtggggtttgtccctcaggcaggcctagcagcggtctgcgtgcatgtggtctagtcgtgtgtgcatgcaggaaacggtggcgcatggtgtgctccacctccgattcagaggccagacctcacccacccaggcctcccctgctcatctttccagttccttcttccttccttctccttccctccttctttatctctctgtcactcctttgtgttctcgggtagggagagga

SEQ ID NO: 811 - DNA, 186 bp, Homo sapiens
ctgtcgcccaggctggagtgcagtggcgcaatcttggctcactgcacactctgcctcccgggttcacgccattctcctgcctcagcttcccgagtagctgggactacaggcgcctgccaccacgcctggctaatttgttgtatttttagtagagacggggtttcaccatgttagccaggacggtct

SEQ ID NO: 812 - DNA, 621 bp, Homo sapiens
attagaaagactagaatgtaataacatgaacaacattgtcaacaatttctgcaaaacatattaaatgaaaaaattcttagaaagacataaattaacaaaactgattcaagaaaaaaatagacatatgaatagacctaacacaaacacagaaactgaattagtaatttaaaattttccaacaaaaaaacccaggtccaggagaaagataggaatccgaggcatccacagtatagaagaagaaatgaaactctctttattcacagacaatacaatcctgtatgtagaaaaatctgatatccacaaaataactgctagatctgataagttcatgaagcttgcaagataatcaatatacaagaataaattacattcctgtgtactagcaataaaaaattgaaaatgatactaagaaaataatttcattctttgtagcataaaatagattaaatggtcataaatttgaaaatataagtactaaacctgtactctgaaaactgtaatacattgctgagagaaattaaaaatctaaataaatgggaccatattccatgttcatgaattggaagactcaatactgataaggtagtgattctccccaacttgttctatagatttaatgca

SEQ ID NO: 813 - DNA, 337 bp, Homo sapiens
aataaggcaaaaaagaaaggtgtatcttagggtgggggaagcatgaggaagagcattctaggcagagggaacagtgtgaacagcatgcttccaggttccggggagcgtggctccctccagagcagggggaaggcctgggaggctgaggccagggaggagggggcccgtcgaggcatgaaggttcagcaaggcctgatggtcaatggaggaaccgtgcctttaattctgagctcacccgggtgtggggttctgctctgtttccttccatgccctgatttctctgtggccaagtacacttggccgtcattccatatgaccaaggagaggccaagaatgt

SEQ ID NO: 814 - DNA, 505 bp, Homo sapiens
agtcatgagacacgggacacatcccatcagttctcatcttttcagtagacacagtcgtagtgccaaatacaggctttgtttggagggtaatgcatacaccgtgctcagttccaagttggccacatagtgagtgctcaagatgtgatagagatggctttggttctttttatagggctggtttgggctcatactttgttagtatagctcatgattaaaggtttggggattctgtgaagtgccttatgcctgtaatcccagcattttgggaggctgaagcggaaggattgcttgagaccaggagttcaagaccagcctggagaatacagcaagactcccacctctacaaaaaatgagccaggtggtggcacgtgactgtagtctcagctactcaggaggctgaagtgggaggatcacttgaacccaggaggtcaaggctgcagtgacctatgcttgtgccactgtactccagtctggcgacagagggagaccctgtctcaaaaaaaaa

SEQ ID NO: 815 - DNA, 269 bp, Homo sapiens
agtcctgtggagggatgtattcaggcctgctctcacaggccttccttgaccctctccccatcactcccactttgtttttatttgtggcacttaaataaaaaataggtcatgcatttatatgcttcaaaatcaattctatgtggatgtgtgagcagtctctgtcctccactcctctccctgcccaccttgttccttctccccttacgtaatgatttgtattttcccttgggtatccgtctaaggtatcattatatcaatacaagcaaata

SEQ ID NO: 816 - DNA, 366 bp, Homo sapiens
aaattagaggctcagatgaaatatattctgagattccaaaagcacccagcattactttttacttttagggaatgcctgaaggagggacgctagagaataattcttggttatgttgacccttactggtcatggagaaacactagtgaaaaacagaaaaaaacacaaactttccagcagctcaaggttcttccagtttcccatttttcaattaattactcatgagcaattaagtagtagaaatcctattctcgagagattcatttcaataactgagaaaactttttgaattacttattaaatcacttctgattttgttgttttatgcttattatacttcacgtataaaccagcattgtcctttagatt

SEQ ID NO: 817 - DNA, 366 bp, Homo sapiens
aaattagaggctcagatgaaatatattctgagattccaaaagcacccagcattactttttacttttagggaatgcctgaaggagggacgctagagaataattcttggttatgttgacccttactggtcatggagaaacactagtgaaaaacagaaaaaaacacaaactttccagcagctcaaggttcttccagtttcccatttttcaattaattactcatgagcaattaagtagtagaaatcctattctcgagagactcatttcaataactgagaaaactttttgaattacttattaaatcacttctgattttgttgttttatgcttattatacttcacgtataaaccagcattgtcctttagatt

SEQ ID NO: 818 - DNA, 98 bp, Homo sapiens
gtagagacggggtttcaccatgttggccaggctgatctcgaactcctgacctcaggtgatccacctgcctcagcctcccaaagtgctgggattacagg

SEQ ID NO: 819 - DNA, 98 bp, Homo sapiens; identical to SEQ ID NO: 818

SEQ ID NO: 820 - DNA, 338 bp, Homo sapiens
gttaagagtcaagggaagaactcatcggaagagtaaaagaagagaactgaaaagcaaagggggacaatcaacaaaatgtgaacataagtttatacgaggaatgcaatcatacaggtaccaataactcagttgtaaggaataattgaaatatgcacatacataaaaagtacacatactttgtataacttggaaaacatttgaggatcaaataaaataatgtattcgaaaatatttataaaaagcctgaagttttctacagacaaattagtgggtgcaatactgagcgctactccttgaaggtgaacaacatagaaatattgttcagtgcaactcaacaa

SEQ ID NO: 821 - DNA, 339 bp, Homo sapiens
gttaagagtcaagggaagaactcatcagaagagtaaaagaagagaactgaaaagcaaagggggacaatcaacaaaatgtgaacctacagtttatacgaggaatgcaatcatacaggtaccaataactcagttgcaaggaataattgaaatatgcacatatataaaaagtacacatactttgtataacttgaaaaacatttgaggatcaaataaaataatgtattcgaaaatatttataaaaagcatgaagttttctacagacaaattagtgggtacaatactgagcgctactccttgaaggtgaacaacatagaaatattgttcagtgcaactcaacaa

SEQ ID NO: 822 - DNA, 339 bp, Homo sapiens
gttaagagtcaagggaagaactcatcagaagagtaaaagaagagaactgaaaagcaaagggggacaatcaacaaaatgtgaacatacagtttatacgaggaatgcaatcatacaggtaccaataactcagttgcaaggaataattgaaatatgcacatatataaaaagtacacatactttgtataacttgaaaaacatttgaggatcaaataaaataatgtattcgaaaatatttataaaaagcatgaagttttctacagacaaattagtgggtgcaatactgagcgctactccttgaaggtgaacaacatagaaatattgttcagtgcaactcaacaa

SEQ ID NO: 823 - DNA, 338 bp, Homo sapiens; identical to SEQ ID NO: 820

SEQ ID NO: 824 - DNA, 355 bp, Homo sapiens
agccatgatccaggagaaaatgaagtgagccagacatttgggaccattttttcctaagggcccttgttgattttggaagaaatggctgagaagctgatcagtactatcgatatcttatggggaagagggaaaattggaatttaagttttaccaaggtggattttttttttatataaagctctcataatttgagttgagaccataaaaggccacagcctgggagtgggtaaatcagaagtagactggctccctcgggaattacaatacagcttgaaatcatttcagtttcttgagttggattaaggtaattcttgatgctactgtctatccatctcatagaagtaaaagtatatcc

SEQ ID NO: 825 - DNA, 667 bp, Homo sapiens
tggaggttgcagtgagccaaaattacgctactgcactccagcctggtgacagagcgagactccgtctcaaaaaagaaaacaaaaccgtctctggtctttggtgtacatttttaaaagtgttggctgttgaattgagatgtgaatcacagcaatatttctggcagctctgctggagtgtgtatatgctgctgagaatactggtggtcacttctggactgtgccttcctgagatcactagcctttgctcaggaaagagagagcatattcctagggcaggacctgagaaaggcaaaggaaggtacaggggaatgaagaaaggtttgttagaagtaagccttttagaatgctaccaagaaccatgtacttcatagaatgcttaaaaaatatttgttgtcggccgggcgtagtggctcacgaggccgaggtgggcaggatcacctgaggtcgagagttggagaccagcctgaccaacatggagaaaccctgtctctactaaaaatacaaaaaatttagccaggtgaggtggcatatgcctgtaatcccagctactcgggaggctgaggcaggagaatcgcttgaatccaggaggcagaggttgcagtgagccgggatcgtgtcacccactccagcctgggcaacaagagcagaactctatctaaaaaaaaaa

SEQ ID NO: 826 - DNA, 659 bp, Homo sapiens
aggtgtcaggctttgcaccctccctgttttttgggaattggcccgaaggctttagtaagagtaagttgggagctgaagcacatatgtttgcttaactttatttaacatttttattttttaaactgtagattcagatctgactatacaattgcacatatctaagtattttttttcttctggagttacaaacccttcatctgggtttgtgtaggaatgaaatagaaattgcaaaaaggcaaattattatgttttcattagaaatttaactttagtcctgtttctgtcataggacaattttcgcaaaccccaaaacgattctataaaaagctatttctggtctttctgctttagcaattggtgaaatttccacaaaattttaatcagtggaaaaccatgtaacaagcatgtgtttttaacatgaagctatgactaattatttgagaatactactttaggttaaacttcatacaaaagggcaagaagaaaaaaatatgagaaaacagaccctttttctgcttaaattcacaaatggcagattcacagttggctggaacagaaacagcagggcccttcagaaacttcacagttttaaaaaatgagttctcactattttgcccaggctggtgtcaaactcctgggctcaagcgatccttctgctc

SEQ ID NO: 827 - DNA, 793 bp, Homo sapiens
ttttttttttttttttagaaaaagaccatatggaaaacattcatcttagcaacttctgataaaaagaaaaaaaaaaaaaccctgattttaacttaccactgatttttactaaacttttaatctttagtttatgcaacaggaccacaatttcttttcccagttattaacacccagattgtttcaaaccctgaaaggaaagtgcaaaacatcatgctgcagaatttctatgccttagcttctgcagtgtttctctgtaaagtggccaggatggcccctgtcattcactttcggagctgtcttcactgtcttcactctcggagtgtcttcactcttggagctgtacaaattatgcttttcgatgtattcttggacaagatctagtaccaagtagtggatgctctggccccttctgagggctcttcagatttttgtggatgagatatcattagtgatccattcattcaccacatgaatgttgctccagtgtttccatagcacatcagattcatagatgaatttctgagcagcatttccagcttgagtaatgcatatgagcccatagtctgccatgatttgggtgatgtcttcactcttccagaaattgggaacaccaaaggactccagtaaatctgccccacacagcagcttgacttttggtgcaccttttgtttttggctctagggatctcttttgactagaagcttgtctttgttcagctcatggaattcctctttcgtccaggcctttctagtgtaggtgagttctgctgttgatcacagtcactagcctccag

SEQ ID NO: 828 - DNA, 314 bp, Homo sapiens
atcagtaattaatatttattcccctgtgaagttcattgttctaatttccattattcagaggggaagttctatccttgaggacacccaaaagtatgctgttacatggcagcatcagcagcatcctcggcattggaagaaaaagccaagcagctcgttctctgtacaaagttgttgctccataaataatataacaatagaatcatttcaccattatcaggtctcctgcaagggttaccacatgacttgtccagtgaggtcctgaggtcagtagagtcacagctgagcagggcatgggcacttctaagtgggaaggc

SEQ ID NO: 829 - DNA, 281 bp, Homo sapiens
gtttttcatactgctagcaagttttacatttttttcatcaaatggcatgttgtgactgttcatctcaaagattagttgtacatgcatggtttattatttgttaaacacacaaaaacaaccatagtttttaccatgagaaaggttttggtagagcaaaacctaatgcacttttatatttgcatttcatctaaatgactagatttgtgaaatgtggataatgtcttgtacaactgctctttgctcttcctctgcctcctctctcttcatactttttatttgtt

SEQ ID NO: 830 - DNA, 2174 bp, Homo sapiens
agggggcgaggactcgggaggaagataaacgggggatcccgtgtctggactttctcctccaccctcttcccttcgcagctgtgaatcctgggaggggaagggtggccgccccgccagcaggtgagcggggaggaaggggcggggacgggctgtggggtcctcctgggctccgtccatgaacaggccggccccaaagtcccgaagccgtgaggtgtaaggctcagaagcgtccctccgcctgtccctgccagaccccaggaactcctccgagccccacagcacgttgtcgccgtgtgcgctgtggggctgcgtgtggttcttacggtggtgtccttagtcgtcggggacctgctccccctgctctggacacagcccgagtctcacaggctctaggggcatgatatggtcctggcgtggcttccgaggcctcaaccttagtgtacaaaacagcacacggggccctgaggccaggagtgcagctccgtctcctgcctctcctccctgctcgcgtcctcatcctaccacaccacactgggctggcgaggggagggcgccctgagccgctgggcatcctgctccgcgggagggtgaagtcgtgcattgctgggcggtgagggctaggtccacacagcggggactggcgggcccccgagtctcctcaggacccgccctccgtgccacacagcgggagctggagccacggtgccgtcaggagccaggggtgattggcctgggctggcagcccccaccccgcgggcagacgctcaccaggctgtccccactcactcccacaccccaactcctcctcacagggtcgagcccgctctcatttgcacctccgcgcgaatttggaacggatttatgaatcgtcctcactgcggtgctgtcttctcctgggaaggagcctcagtcctcccctccctgggcactgtcatagagatgggcaggacgggctggggaggacactcagggagctgcccaggctcctttgctgcccctcaccccagaatcttcttggggtgggtggggtcccaggcacctgcagagtagcatacggtggcttgtagaaagagtatcgagggaggggagttgccacgtggaaacagcccaagccaaacccctaggacttgtctccttgtcctcctagagagctgaaggtgttccgtggtcagtgagggctggcactggctctgcacgaagatctcctcacctccccagcggctcctggccagctccccacggagagcccaggacacttgtccctggacacagtggtgcagccatgcttgggccaaaccatgaggccaccagaaccgcgaaaggctactgtactgagagggatactgcgagagaggcccacaggtttccaagcatccctctcactccgcacactcatctccacgaccggctttaagtgcggccttgaggcctggctccctgtttggacttctctgcacctccaggagctcacttcccgtcacagctggatgcctcctcccgcaggcacctcccgggcatcctcccgccccaggctgcaccttctgtgggactggcccccgcaggcacctcccgggcaccctcccgccccaggctgcagcttctgtgggactgagccccgcaggcacctccccggcatcctcccgccccaggctgcaccttctgtgggactgagccccgcaggcacttccccggcatcctcccgccccaggctgcagcttctgtgggactgaccttaagaccccatcggttcctcctgagagcagcagatctcagccagatgctgccgggagggaggtgctagcgtccacacccagacgggtccagtccagccctgctctccctggtctccaggcagggccctcccagggtggacattgcccatctctgcctggccaggggctgctgacccactggttccagagtctgagcctgtcctgcacaagtaccatggacaggggtcagccgggcactgaagaggcgtggcagaattgggcagggcaagggccccagctggcaagctggagtcagggcaattccaaccaagaaactgcggcaggccgggtgcagtgtctcaagcctataatcccagcactttgggaggcagtgggagaatcgcttgagcccgggagtttgagaccagcattggtaacatagagaccctatcgctacaagaa

SEQ ID NO: 831 - DNA, 475 bp, Homo sapiens
aggactgagaggtgtcagagctgctggtgacaggagcagggaaagcaccatctggccagcccccaggggccccctgtagggttcctctgcctggcagcgtttcgacgcttcttggcaggatccttgggtccttggcccccggcaccatctccctccttgacctgctgaggcccacataaaacatgttgctacttggggtgggcccgtcctcacgctctgtggcttcctgggtgtccacctccccacagcctgcctcacctacctccccagacttctcacgcacgtcaggagcctcctgtggactctggctctacctgcctctggcctctgcttaatcaggaacccacagtgggaaagctcctagggcccgcctgctgaagcaaacgcctccttgcaaagcccgtctgcagccccccacacacctcctcacctccctgtgcttcctctggagcccaagaccagtctgcctcacttg

SEQ ID NO: 832 - DNA, 275 bp, Homo sapiens
aaaataataaagctctagttgcagtaaatggaaacaatatttaggcttattggattgttcaagggacatccgatttgccactctgccctttgtcggcaaataacttagacagactttaggatttaatgggctgtcatttcagttattctgcagcatatcccgggtacatgggagagcattcagtgattaagtgctgaatactgtctattgtgaagacttttggaacagggaacagagaaaaataactttccttccaacaacatgaaacatatggt

SEQ ID NO: 833 - DNA, 321 bp, Homo sapiens
gtcacttgcttcctgtgtgatcttaagttgtttcacttctgagcttccattttcctccataaaatgagggtaataatttctacctatagtgttgttgtgagatttagacacaaaatgtttttaagctgtgaagtacgaaatatataaaaacattggttattatagatgaggccagcccaaaaagagtgattgacttgtccattgttccactgtaacaacaagtagagtggaaaatgtggtacaaatgcatgtcctaattctagtcaggagctgtggccacaagggccaccaaatccaaagtagcagtatcctgccacggcc

SEQ ID NO: 834 - DNA, 574 bp, Homo sapiens
aaaataggcactcaaataaatgtaaaatgaatgaatgaggtaaattattctattagaggtaagtgccgatggcctcaggcttactaaggcataacctttgtagcagcacaattttcagtgaacaacttcacattccctgcatgcacagaagcctcagctttccaggttactcttgggctagaatcactgtgaacggggctgcagtggggctagtggaaagggcacagaagccaggagacctgggtgcaagcctgtcacttgcttcctgtgtgatcttaagttgtttcacttctgagcttccattttcctccataaaatgagggtaataatttctacctatagtgttgttgtgagatttagacacaaaatgtttttaagctgtgaagtacgaaatatataaaaacattggttattatagatgaggccagcccaaaaagagtgattgacttgtccattgttccactgtaacaacaagtagagtggaaaatgtggtacaaatgcatgtcctaattctagtcaggagctgtggccacaagggccaccaaatccaaagtagcagtatcctgccacggcc

SEQ ID NO: 835 - DNA, 9384 bp, Homo sapiens
cagaatcctggtaattgatgtccacccgagaaatccctgcagatgttccagcctctgtctagtccagatagccacaggaagggtaaggtcttgtaaaatagccaccttcttagtatgtttcctaaatgctctttgtcagtgttgacttttgagaagctgattaatacagactaaattcaccatctctgggtccttggtctggcactttcctggttaattcacatgaatggcatttacatgtggacacctgggacaatctgtcttgtcctcaaaggattaagtaacacagtttgaagctgactttaaactattttttccgtcattaatggggccctgagcatctttcataaatcaggaatgtgtcttggaaatgtaattctcactaaactcagttccaagggtattttctataaaagcacattcttgtttgttctgtcataacacatgcatttgatgattgtaatagcattgacagaaacacgattgaacaggaagcacggccattataaataggtcagtttgatataaattcatgttcaaagcacaaatacagctttattagacacaagacaactctaggaaaatattgattacattttaaagcaaaatggtctagttaagcagcaagtctgaaaggatcctctattaaaaaatatatatatatgtatatatatacacatacacacacagcaaagcccgatgtgtcatataaacaattactgatgtcaatgaaatacagtcaactgtgcaaagggtaggaaaaaactggttctgattttcagctgtggcttatccacagtgtgatcctacgtagccagtgagttgtattttaataaaggattagctattatactacacttttttttttttttggcaaggtctcactctgttgtccaggctgcaatacagtggtatgatcatggctcactgcagcctcaactcccaggctaaagtgatcctcccacccaagcctcctgagtagctgggagcacaggcatgcaccatcatgcctggctgatttttatttatttattattattattattattttgttttgtttttgtttttgtagagatgcagtctgactgtgttgcccaggctggtttcaaactcctaggctcaagcgatcctcccatcttggcctcctaacgtgctgggattacaggcatgagctgctgcacgcagcctgtattacacctctgaaatcttttatcagggaggtggcagaacttactaccacttagtgtattccatgtcagacactattagagactttccatttttctaatgtagcaaccctgtaaggttgttttcactctacagatgagcaggttgaggctgggtagggttgactaattggcctggggtcagagagctgacttgtagggactggagcagcggtttgggcccggcctgtcttgctgcagcatcagtgctctaaccactcactcagcaggagagtacatccagcatttatttagaaattggatcctttctttcagacatgtaagaatgaagaagttgtctggcacaaggcttctaggatcttaaagactggtaattcctgtagcttctcatatttgtgaactgccagttgaatatggtacttaagtttttgctcatgcatcttgatgtaagttatacaaaataaaatggagttactttgctattttaactaatcttttagatgtagataaaatgtagcactgacaactataccttaggcttatgaatataggagccttgttgaaaatgttacatgtaagctggagtgaggtcttaataattgccataagttattgatagatgaaatgggtctatagtcttttttcccctatgatctattatagaaatatttcaaagtgaatttctgtttctgttcctcttcagtgagttgttcttccttcattgaaagtccataggcaattggaacttttgtgaagttggtcgtacaggagcatatatgactacagctcattctgttaggggctaacatccaaaatacattgctgcccaaagactgcaatcagattatatagcctacttgttaattcctgctgattatgtttgcttctaattatttgcagtgaggtaaagctttatgatctgtggcatggtgagaacaaagatttttttaaaagtaaaatacagttgcattgagcaactagaaattgtccataactgtaatggacaacaacatacattttcccccttttattaccaaaaggtggcttaaggtgtacattgctgcacctccattggttgttctccttttaaatttgttgtaaaatcctcttaggcataagataaggcctattattttatgtatctgatcagtattgtatttatagttcatgggcgcagagttttctgttctttttactgttaaaatatcatccgatgaaatgttaaggaattgctccttcttagaaatgtgtgtttatctactagccggttttatgatgttctgttgggcactaggcatgcattaaattgcatggttagattgattcagagtaatttcattttagaggagtatgtgccaattctttttcctctccaaaaggcatggtttcagagcatggccctgtgcctaatgttaattccataaggctcctttgttatgctccccaccccctaccacacacccgcaactggcctttgccatgaggaagatgtgtacctataatcaggcatttctttactttagggttatttgtcatgtcagacagcatggacttttgagaacaggcttaagctagggaaggcaaagttatataaactgtattcattgttaaatatttgcttccagggaaggtgaaaaatgctttgtactttttcctttggcttttttccctcaaaagagcttgtcatgcaacagcaacaaaaagtggccaaaggcagagaaaactcttctcttttccatgttggtttgtttttattgtaagacaaacctttcatgttttattgttatgaagtttaaacctggcctagaggtgccaatctttagtggaaacagctgcagagttggtgtcccccgatcaggtgggacttctttgaagcaacatgttgccttttaaaagagaattgtgcatgtgagaacttgaatctgtaaaactcatcagcagttccaccattgtttatcttttaagtaactgagatagctaactttaagtaaaacattgcaattaaaaatcgttttctgaattattttttttccaaagagaatagccttattactttttgtcttaaaaatacagaaatgagggaaaaatcacctttaagaattgaagatacagcagcccagttgaactaagaccatagagcacattctttgataactcctttttgctggtctgaactgttgattcttacttcatatttatacttgcagataaatgcctataataggagcaaaactgggtggttgggcatatatctgaattctagagattaagattttctacttgatattgatggatgtggaagcattgctcatctttttgattgagtggtacggttagcaatggagtcggcatcattcttggtctactgctaggaaaagttgagcatcagagagctttttctccttgggggaaaatagaagagacaggcatggagtcagagggacaagaaaaatgctgaaatattttcctttggggcttttgatttctttgccaaaaaattgcctccagatggagaagagcaaaagctctgattgtaagccattatgtttttactggcttatctccccattccgttgcctggtttggaatctgtaagctagtccaaatcctttacctcattttctagtaccaatttactgtcttactcatcttccagctgcaaggagtgaggcaagtcgccttaaaattgaaccctgtaccattttataaaccaagcaacagcagagtcttgccaaggaatatcagtatcaatggcttccatgtccctgaggttcttgaatcacacctaccaggtcaacttcttgtgtctgtgacttgtgcggtaggattggtctgggaatgaatctaacaggcccttttggctttgtgaagacttgttactacccaggttgtctagcattctgagctgtatggggagcacagtcatattttggctgtatttcactggcagtagaaatcttgacattccaatttcccttgaggggtagtaattgtttaggggttgaaactggagaggaatccaacatctggacatggcaggtacagtagcattggagtctggcagacttgagcccagatgactgttccgcaactaactaaacaatatccttgggcaagtcattttcttcatctggggctctggagggccgtctttttcctctgcctagatattctggcttgtgtgatagctcagcctttaggaattgttctggattactgctttttatcttcctcaaaaagtagccatcactccaagtgctgaggtgacaaggggagcgtcctgttggcactatctcatgttttggctgtggtatccctctttgaggtgggtaggagagcccaggatgctggaggctccttgccagcagtgtagagagggtccactctagaacagtctcctggcttgttcccctgccccacaccccgcaacttgtctagagagaacagggagtcaagtttttatttcatgttgggcaggagaaccaaaggcatctgtaaaacctctgacaaataaagacggttagaaattagaaaattaattctctaccaaattatgaaaaaaaatctgtttaatgatgttcacatttaagaaatgttaatgttatctttgtgaagttactgctatgagatttagcatgttttttctccctctttgtaggtactggttttggattaggaattgttttctcacttaccttctttaaaagtaagtgtcactctgtcttttcaacataatgtcatagtgtatacatatacgtagcagggacacttccagaggacacattggaacccatcaatttgtgggttgccaacccatccatttatggggttaggtagcccattataaaatgaattagataaagaatgtggacttgaaagaggtcaaaatgggttgggcatctccagcattcccctgggcactgaggcagggtgcctgttatcctaaatatgatatcattgcaaaagcctgtacttgatgccagtgagtcatttggccaagtctacacgctcagatatttctaattaattgtgattttttctagaggaattgaaaatgagaatcctgctggtaatagaaacaagtagaccagaaatacacatacttcttggtcaaaaattatcctaagcaaagggcaggcaatattcttttcattctgtggaagaacttctgaagtttggataccgaatagatgccagagggatccttttgacctctttccgtgaagaaccagtgggaaatacttgactagagaatcataattaacacatagtgctgatatgaaagaatcacttacagagtggcttaaataaaccccatgacttactactacaatcaaagcatgtaaatatcggtaaaatgcttacatctttttagaattcatgcatcttactggctaagatattagttaaactgagcagatgattagaactgatatagagaagttaaaaggtttatctagtgttttcatattttactacttttttttttttttttttttgaaacggagtcttgctctgtcgccaggctggagtgcagtggtgcgatctcagctcactgcaacctccgcctccctggttcaagcgattcccctgcctcagcctcccaagtagctgggattacaggcacacgccaccatgcctggctaatttttttgtattttagtagagacagggtttcaccatgttggctaagatggtctcgatctcctgacctcgtgatccgcccgcctacgcctcccagagtgcggggattacagttgtgagccaccgcgcctggcctttactacttattttcctcaaacttatcagcataggcacttaacaagtatttgctaaattaataacttcactaatttacacctcttttttggggccattgtgaaacattgataaaaatgtatggttattatagtcattagtatgatgcacgttgaatatttattgaaccctaagtaaatgtatttaagaggatggggagctttatcttctcttaataattccctattgggattttcccttttttgctcactaggaagaatgtggccattagccttcggttctggcatgggattaggaatggcttattccaactgtcagcatgatttccaggctccatatcttctacatggaaaatatgtcaaagtatgtacagaatatatatttctctttccttcagaagaaaaagatttctcctgagccctgaagaattctttagactgtttgtaatgagtaaaccatgtgtgtcattgtggcaccactctcagatactaattgctctttggccttcagtgatgtcatcactgctttggtgctaaagtctcccctgtgccttcagatgcgtatgtacgttcagatatatactcatgtgctagccgattggaattaaggagcctgcttgaatgtttatcatcaatggtaaggtagattgtgttaactatctgtaagtagcacttttcatttaagagctcagagtgccctgtaaacatctcacatatacttaagctaaacccaaagacttccgggactcagccatgattctgctttttattaatttgtttcatttttttgagacggagtcttgctttgtcgcccaggcaggagtgcagtggtgccatcttggctcactgcaaccgggttcaagtgattctcctgcctcagcttcctgagtagctgggattacaggcacctgccaccacgcctggctgatttttgtattttagtagagacggagcttcaccatgttggccaggccgtggttctgctttttaattgaagaaggcagtctggactgtaagtctcacattctactgaagtcctgtcttcaggtggatttttatttttattttattttatttattttgtggggatggagtatcactctgccaccaaggtgggagtgcagtggcacaatcttggctcactgcgacctctgcctcccgggttcaagcgattcttctgcctcagcctcccgagtagctgggattacaggcacgagccactcacgcccggctaattttcgtatttttagtagaggtggggtttcaccatgttggccaggctggtcttgaactcctgacctcaggtgatccacccgtctcggcctcccaaagtgctgggattataggtgtgagccactgtgcctggccttcaggtggatttttaatgctgcacacaagctggaaacttcttacccacacctccaaagggaagagggcagcaggcttcctcagggcttcgtgtgtagcagtattttccttacttgatgattagttactgtggggtttaagtgacaggaacattggaggctgggtgcccaaggacagaggtggcacttattttgtattcccagggcctgaaacaaaatagcactcaaataaatgtaaaatgaatgaatgaggtaaattattctattagaggtaagtgccgatggcctcaggcttactaaggcataacctttgtagcagcacaattttcagtgaacaacttcacattccctgcatgcacagaagcctcagctttccaggttactcttgggctagaatcactgtgaacggggctgcagtggggctagtggaaagggcacagaagccaggagacctaggtgcaagcctgtcacttgcttcctgtgtgatcttaagttgtttcacttctgagcttccattttcctccataaaatgagggtaataatttctacctatagtgttgttgtgagatttagacacaaaatgtttttaagctgtgaagtacgaaatatataaaaacattggttattatagatgaggccagcccaaaaagggtgattgacttgtccattgttccactgtaacaacaagtagagtggaaaatgtggtacaaatgcatgtcctaattctagtcaggagctgtggccacaagggccaccaaatccaaagtagcagtatcctgccacggccctgcacctgccattttagaacctgctgaaaccgtcagctgcctgcagccagcccatgtctgctggagagatgggagtaggggagccatctctgcaccaaagcaagagtgaggtcatcacagggaccatgcaagaagaggcgcagctgtgtggcactgaagccggcagccggccttttccaccactccctggctcctcgctttcctggcatcagagctgattgtggggagaaccgaaaggagcagacagagaagcttcaggtcttttgcttaaaacatttccattgttccaaactgagttgtcagggataatggctcaggggtgattatatgcatattatgtatttaatggctgggagttcctgtggaaaatattgttccattttttacatttgtgtgtcctgctccaaaatggccttgtaactttatctggacttgagtctgtgcctcgatgttgtcatcctccattccctgaaaaatggagcaaaatcccaacctgggcttattcagtgtagtcctattgtaataactgcctcctgagtgcccaatctgcccccaggaccatcctgggtgctttatctttaataatctttccctctagacctgccagttgatttgtgagagatgttactatcctcattcagctgatgagaaagcagactcttaccggggttgagaaacttggcaaggccatgtagttcgtaggctgatgagaaccatgctctccccactcccctgggacgccttcgacaggttttaggaattgttatccaggtcatgatggtttggccctgttccactcgtttcccactcttctccctggaagattggggctggatggcactcttaggaacctaggtagggtgtacatagtcctgttgtgagacagttttaacgtaaacagtgtgataaggttttggcttctggccctttgggtctgacctgatacagcaattagagagggttgtcagaatgccgtctgcacagttttaagctgaatgtccttgctttacaggagcaggagcagtgacttcacctgagaacatcccagcgggaggacaagagaaatcatgtttattcctcaggaatactgaagtgccctggagtaagctgccattcttctgtaacaatgttatcagtaatgctttaaactccagcacctggttatgcatttgaaaccaagtctgtttcttgttttgtattttctctctggaagttgtaaggaggtggtcttaaataaattaaacaaaaagaggaagtccattgc

SEQ ID NO: 836 - DNA, 99 bp, Homo sapiens
gagttttgctcttgttgcccaggctggagtgcaatggcacgatcttggctcaccgcaacctccaccacccgggttcaagcgattctgctgcctcaacct

SEQ ID NO: 837 - DNA, 252 bp, Homo sapiens
gagtttgttcctgtggtttcacttgaaccagggatgctagatgcaaaagtcatattttagcaatttcttcagacgatatacagaaccccagcgctcagccgttcttatttctttttccttatcgtagaattaagatagggagagcccgatcccacttgcccctgtatcctgtaaatgttgatttatcatctactgtaagcgaggcactgttgtaagcagcagagataaatggataaatagacacaggcttct

SEQ ID NO: 838 - DNA, 469 bp, Homo sapiens
cttgtttggaccataaattttgtgttcatactaccctttccctacattgaattcaaactttgaattccaccaacagtaagcatccttatgagtgcaaacatccttgtacttatgtcctcatctatccaatccctcctccttatacacttattgggaggaagacattaatactttactcactcgggctgggcgtggtgggtcatgcctgtaatcccagcgctttgggaggccgaggtgggtggatcacttgatgtcaggagtttgagaccagcctggccaacatggtgaaaccctgtctctactaaaaatacaaaaattagctggccctgatggcatgtgcctgtaatcccagctacttgggaggtggaggcaggggaatggcttgaacctggaaggcagaggttgcagattgtgccactgcattccaccctgggtgacagagactctatctcagaaaaaaaaaaaaaaa

SEQ ID NO: 839 - DNA, 504 bp, Homo sapiens
tatgacattttccactgttaaacttcagagatgacccagctggttctagctaggtaaatggatgtctaccttcatcaagcagctctttcactcaggatggcctgttcaggttgttttgtagccaggtatatcttcaccactactgtctcttgctagaacagtaagtaatacaaggtaggctttcagaagtaaaatagcaaatatgacccttcacacacaactatggtgggtgtgaagccaccatagttattgccattcaattagcaaataaaacctctctggatatagaaagaatgctgtgtaaccaaaaagcattatcaaaactagaatgcgcagggcttaccaaaaaatggtgaagatgttgccttccatgtgtcattctaggtcctaaggatttttccagctgcactctcaccagacatcacattcttgcaccctggacgttggtcttacggtacagacattctgtctttgtttatgctggtcactctgcctggagtgcct

SEQ ID NO: 840 - DNA, 471 bp, Homo sapiens
gagggaaagaccagttaggaggtggagggcccctcaccaagagggcaggtgctgaggatgtcagaatcgctgaggactggccatggtgccacgctggatgtggggtccctgctaggggttgggatggtggggaaagactcgtgtccagcagggcggggggcaggtggtttccattcagactgcatcacctatccattcagcccctcagcactccgtgagcttttataaaacacccaggagatgccaggagcttactgttgccagagaggtgggggtgcctgcatctcagagggggctaaggactggttaagggaacagactcttccccagtgactcaaacctggctgaaggtttttgtttgtttttaatccagaaaagtaaaatgactgttaacagagaaaaggagaggtgggggcggggaaaatttcagaaagaaaatctctatccctacataaatcaaatgttttaaag

SEQ ID NO: 841 - DNA, 1829 bp, Homo sapiens
aaaaaatgatgagtatataaccagaaggagcccaggtactataaaagctaagtaacgaggaaacaaaaaaatgatgagtatataaccagaaggaacactcagtttgattcccatatcaggaagttcttgggttcagtgcaagacttgaaacctgacatggtttcattagattgtagaaaacgctttttttttttttttctggacaacagatggaaccatgttgtcggttgttcaaagatggacaggagacagaaatctatcaacctgaagtcagctccaactgcagctgtctgttctcctgaggactgtgctagtggtccacagaggtcaccttgcttatcacatgatattttcttgatgttagttgaagcacatcaccttaggtgacacatgagggccaaaggcctctttctcagggatgtatgtgaaagtgtggtgggttggggaccagctaaggaaaaaaagacatgaaggagaatgcaagcatcttacagtcatcattcagtaagaaatctttatgactggacaaaggaaaacataaacgccctttaacctagaatgcaaatttctagtgatttttacttttttagtgtatcagaagtcactgagcaaggtaagtaccagcacttacagagacggagtcataaaggctgctctctaaaagtagaggatgtgcaaaacctgtagtaccatttaacagatttttgaccttgttaattatgtcattttgaaactggaataaatatgtaattcgaaggttgatttttctgaacaaaagtaagtcaagtcaaagttttctcagagtctactgtttgattcttgagggtattcagaattcaagattgatgtgcatttcaacatttcagtttctgcctaagtgaagcgtcacttaaagccttcgaaattacagatgtaaaatgaggttgcacgtgatgtcagtagctataattcctactctggaggtagctcgatgtgtctgaaggctgagtgagctgcggcaggatgaatgaatctttgacttcaggagatgctgttctagtctgtaaccttgtcgtgtggaatcagcccatctgatgctgaacactaacttgaaatggctggccgaatgcagagtaacacatcagagcactagaccggtggaaagaacctagattgcaagtccagtgaattatctgcatcttcattttgttaggtgtagatttacttttgttattggttgcaattgcaatattttaaaatcatgattatgcgttaactccatctatttctaaaacattggtatttgtgtcatttttagtgtagcttgatttttgttttcttctttctggtacaaaaacgagtttctccctccaacccctgccatgtatatctgtatcatgtatatctgtatctacattcctgtctactatcaatgcctactatttacaaggtagttcagttcgtttcagatcaactagaatttattgagtaccctgtatgctaatccctgtaccaggggcttgggatataacagtgaataagttcctggggcttacatcagtcaatatagggttactgtctattgaacaagattatttttgggtttctatctatttggggatatgataatgcatgtatttattcctaaccatcacacaataatattatgaaacaatgttagtaggaggaaggtgagagccttcattttaactgggaggacttggttctgtctaagatgttgcttttgttatgggttagtgcctattagataacattctgtttctgtgactgattatttctttttgaccttctgagttttagtttgtccactgagttttaggtaaaaaaga

SEQ ID NO: 842 - DNA, 1844 bp, Homo sapiens
aaaaaatgatgagtatataaccagaaggagcccaggtactataaaagctaagtaacgaggaaacaaaaaaatgatgagtatataaccagaaggaacactcagtttgattcccatatcaggaagttcttgggttcagtgcaagacttgaaacctgacatggtttcattagattgtagaaaacgctttttttttttttttctggacaacagatggaaccatgttgtcggttgttcaaagatggacaggagacagaaatctatcaacctgaagtcagctccaactgcagctgtctgttctcctgaggactgtgctagtggtccacagaggtcaccttgcttatcacatgatattttcttgatgttagttgaagcacatcaccttaggtgacacatgagggccaaaggcctctttctcagggatgtatgtgaaagtgtggtgggttggggaccagctaaggaaaaaaagacatgaaggagaatgcaagcatcttacagtcatcattcagtaagaaatctttatgactggacaaaggaaaacataaacgccctttaacctagaatgcaaatttctagtgatttttacttttttagtgtatcagaagtcactgagcaaggtaagtaccagcacttacagagacggagtcataaaggctgctctctaaaagtagaggatgtgcaaaacctgtagtaccatttaacagatttttgaccttgttaattatgtcattttgaaactggaataaatatgtaattcgaaggttgatttttctgaacaaaagtaagtcaagtcaaagttttctcagagtctactgtttgattcttgagggtattcagaattcaagattgatgtgcatttcaacatttcagtttctgcctaagtgaagcgtcacttaaagccttcgaaattacagatgtaaaatgaggttgcacgtgatgtcagtagctataattcctactctggaggtagctcgatgtgtctgaaggctgagtgagctgcggcaggatgaatgaatctttgacttcaggagatgctgttctagtctgtaaccttgtcgtgtggaatcagcccatctgatgctgaacactaacttgaaatggctggccgaatgcagagtaacacatcagagcactagaccggtggaaagaacctagattgcaagtccagtgaattatctgcatcttcattttgttaggtgtagatttacttttgttattggttgcaattgcaatattttaaaatcatgattatgcgttaactccatctatttctaaaacattggtatttgtgtcatttttagtgtagcttgatttttgttttcttctttctggtacaaaaacgagtttctccctccaacccctgccatgtatatctgtatcatgtatatctgtatctacattcctgtctactatcaatgcctactatttacaaggtagttcagttcgtttcagatcaactagaatttattgagtaccctgtatgctaatccctgtaccaggggcttgggatataacagtgaataagttcctggggcttacatcagtcaatatagggttactgtctattgaacaagattatttttgggtttctatctatttggggatatgataatgcatgtatttattcctaaccatcacacaataatattatgaaacaatgttagtaggaggaaggtgagagccttcattttaactgggaggacttggttctgtctaagatgttgcttttgttatgggttagtgcctattagataacattctgtttctgtgactgattatttctttttgaccttctgagttttagtttgtccactgagttttaggtaaaaaagaaaaaaaaaaggaaaa

SEQ ID NO: 843 - DNA, 316 bp, Homo sapiens
caaactttttgaattttgttcatttttaaaaatttttttttctttgtctttgtcagattgggttaattcaaaagccttgtcctcaagctctgcagttctttcttccacttgtttgagcctattgttgaattgtttcatccatatcctattttattcttttaacttctttaagttagttttcacttttctctgctaccttcttcagtagcttaataatcaatcttctgatttgttttctggaaactcagagatttcgacttagtttggatccattgctggtgatctagtgtgatcttttgggggtgttatagcacct

SEQ ID NO: 844 - DNA, 690 bp, Homo sapiens
atttcttttttattattattattctttaaattttagggcacatgtgcaccacgtgcccgtttgttacatatgtatacatgtgccatgttggtgtgctgcacccattaactcatcatttaacattaggtatatctcttaatgctatccttcccctctccccccaccccataataggccccgatgtgtgatgttccccttcctgtgtccatgtgttctcatggttcaattcccacctatgagtgagaacatgtggtgtttggtttttgcccttccaatagtttgatgagaatgatggtttccagcttcatccatgtcctaccccccacatgaactcatcattttttatgagtagcatagtataaccatggtgtatatgtgccacattttcttaatccagtctatcattgttggacatttgggttggttccaagtctttgctattgtgaatagtgccgcagtaaacatacatgtgcatgtgtctttatagcagcatgatttataatcctttgggtatatacccagtaatgggatggctgggtcaaatggtatttctagttctagatccctgaagaatcgccacactgacttccgcaatggttgaactagtttacagtcccaccaacagtgtaaaagtgttcctatttctccacatcctctccaacacctgttgtttcctgtgtgtcatctatg

SEQ ID NO: 845 - DNA, 362 bp, Homo sapiens
aaattttgtaactttttaggtattcttaaattttaaattgtggttaaaaacatgcaatagtcatttcagacattattaggtgtacagtttagaagtattaagtgcagtcctgttgttttccaggaggttagagatgatttttgtcttacaaaagtaaaagcaaatactcactaaacaacaaattgtcctttccacctctctctagctcctgaagaaccccattttactttcttttttcatgactttgactaagtattctatgtaagtgtgattatacagtgtctctttttttgactattttattttacttgacatagtatcgtaaagatttatcattattgtagtatttgtcaagatgtccc

SEQ ID NO: 846 - DNA, 362 bp, Homo sapiens; identical to SEQ ID NO: 845

SEQ ID NO: 847 - DNA, 362 bp, Homo sapiens; identical to SEQ ID NO: 845

SEQ ID NO: 848 - DNA, 359 bp, Homo sapiens
ctttctggtctgtaaaatggggtgataatcctcatcctacccacttcatagacttgtcaggatgcttacataatatatataaatgttatgtatacaacttactgcttgttcaggctgactgaaacacagaacctcatttcctagaattgcccttcttggttcactggaatcacctttttattgctacttgacatgaatagtttcagagctgactaaccattaattgctccagattgtttaccctccattctcctaaagaagataaggcacagccaggatatctgttgtcctgataccatacccattcctttcagaatgagcatataattattcaaacatggagaaaggctgcccaaggg

SEQ ID NO: 849 - DNA, 360 bp, Homo sapiens
ctttctggtctgtaaaatggggtgataatcctcatcctacccacttcatagacttgtcaggatgcttacataatatatataaatgttatgtatacaacttactgcttgttcaggctgactgaaacacagaacctcatttcctagaattgcccttcttggttcactggaatcacctttttattgctacttgacatgaatagtttcagagctgactaaccattaattgctccagattgtttaccctccattctcctaaagaagataaggcacagccagggatatctgttgtcctgataccatacccattcctttcagaatgagcatataattattcaaacatggagaaaggctgcccaaggg

SEQ ID NO: 850 - DNA, 128 bp, Homo sapiens
ttttttgtattttttgtagagacgggatttcaccgtgttagccaggatggtctcaatctccggacctcatgatccacccgcctcagcctcccaaagtgctgggattacaggtgtgagccacggcgccc

SEQ ID NO: 851 - DNA, 128 bp, Homo sapiens; identical to SEQ ID NO: 850

SEQ ID NO: 852 - DNA, 348 bp, Homo sapiens
ggagtcacttttaattttctttattaggagatccaaattcaaataagggcttgtttcagtggttctcaaattcatctgcatattaggaatcacctgggatctaaaaaatgttccaaagcctatgccatacctattacggactgagtgtgtccctcaaaatccatatgctgaagttctaagccccaaagtgactgtgtttggaggcagggccctcaggaggttattaagattaaatgaggtcacaagggtagggcactgaccccaggtcttaataggactggtgtccttataaaaagatacaccagagccaggtgccagtagttcccacctgtagtcccagctaccagc

SEQ ID NO: 853 - DNA, 348 bp, Homo sapiens; identical to SEQ ID NO: 852

SEQ ID NO: 854 - DNA, 3530 bp, Homo sapiens
ggcaagcccatcgccgtgctctgcctgactgtggagctgcagccccacgtggtggaccaggtcttccgcttctatcacccggagctctccttcctgaagaaggccatccgcctgccgccctggcacacatttccaggcaggtcctgcactgaccctgcagcccacatgttgcaggctcacctgttggaagtagatacctcttgagggtgacagatggcctcatggcttcatgccctggtgctgtcagagcagcacgtggggcctggggaattctctctcctgcctttatggtttgaaacggtgtccctcttgccacctctgagatgactaggtgcgcatttgccggctgagtctgcccttctaaaaaatcccagctcccgcggcccaggtccaggtgtgcctggaggaacacctacctcctcacctgacggcccgcgtgtttctggtaggtgccccttacagcagagtgcaggcttccctgctccagggagctgtgttttcttttttgtggccccctcgattattccctgtggagatggctgcagccgagccgcagtgggctggatgggcggtgtccatgcagggaacacagtgcttggatgctgtcctgggaaaggtggcggcgtccgtttccccagcaggtgtcttgctgagcacctgtgacgagcctgtcctgtcctatagtgtgtaatgtgtggggccttctccacacaggctggggctgtggagaagactctttttgacatttcccctgctccaggtgctccggtgggaatgcttggtgaggaccccccagtccatgttcgctgcagcgacccgaacgtcatctgtgagacccagaatgtggtaggttgtgttgtggccccagctcaggcagatccttcccagtgagtctgcgcccctgtcggcttccccacgggtatcctgggatcctcttcattttaggttttctgctaagtggtttctttcccaaggtactaaagggctattttgacatccttatgagagctttatgagtgtgtttttattttttctactagcagatcagctccttgatcatctgaatttaaattttaaaaaggcacgaagcaaagttaataaagtggatggtaattaaggcacttattaattaccattatgtaaaggataaggcaataattgtgttatgaccagttaggaaaccggataaaatctcctgtagaatctaattgttgagatccatgtaaaatcaggaagctaatgatcttctctttggcagtgaacagaatagtgaattccgattggtatagaacatgaacagatgcgttctgggagggactggccgtcactcgctgcgtgtattagtcacagatttaggggccaggctggggtcggcagagcactgtgtgccctgatgtgctgcacatctggttggcagggccccggggagccacgggacatatttctgaaggtggccagtggtccaagcccggagatcaaagacttctttgtcatcatttactcgtaagtgcacaggctttggggacctggaggcggtggcggaggagaggaggaggcaggcctggggctgctggtggattgaaagtgggcttggccccttcctaaaattgggggagctttcgggccttcgctttgtgaggcgggattctgctgcgagttcagggcccgcaggggtctagggaaggcaccttggaggggcacgtgcagcctgagggacttgggatgcagctcctgccaccaaggagagacaccagtcagcctctgtccccagatagtggcaaggggccacccagaagcccctcattacctttttcttgctgagtccctaggctgaacagcatgaatgaagctgtggtccctcctgcggagaggcaggactgtggtggaaatgcccatccctctctcctccaggctaaatgacccggcccctttcccctcccctcctaagtcggatccccaagccctgtgagaatcctttcaaactggtgtgagctcggagatttcctgcagtgcttctgaggatggggcaggggctaacctgcactcagtgcccaccacagaggggccacgtgaccacgtctcagagtggcttcctcgtgagcccatgaagatgcctcacccagccccatttgactatgaagcagcaggctcttggccctaaaatgctaacaggggcttccgtgctcaggccggcatgacctccagccccaccctgtctcctgcgtggcgctgcccttggcttagcctcagaacccctattgggggtggacacttgtccaggatgtgtgtttggccaaagcgtgccttgtcatttgtttgacatgtggttcctaagcagccctgctgcgccctgagagcctctgctgtgggtgggagatgggcagccaggggtggagccaccaggccctagctctgcctcctggggcctggtcctccggggctttccctgcgtggccccagctctgcctcctgtggcctggtcctctggggctttccctgcacagcctcctgtctgcccacgctcctggcagcccttgttggcctctcgtgggccggtgctgagtcttccgggacaagtgcagatggctcccatcccactgcagggatcgctggctggcgacacccacacagacgtggcaggtctacctccactccctgcagcgcgtggatgtctcctgcgtcgcaggccagctgacccgcctgtcccttgtccttcgggggacacagacagtgaggaaagtgagagctttcacctctcatccccaggagctgaaggtacggcctctctgggggctgttctgagcctctccccaaccccagcctggagacgggcagtgggcattcagctggagcacagtgggtggccctgacagcagcttttccagcgcctccagcgcgcagacgctgttaccagaggcctctcggcagttgcctttcgttagatgtgccattgtggggtgagtgacgtacacaccaaccccaaaggccggtgttcagaattcctggcaaggtgaacagtgacaggagctctggtgttagtgaagccacagttagacggggtgggagggcggcccctggtgccaccagctggccggggttttaagcccaagatggcttcagttctgtctgcggaggcagcgcttagggaatagtcgccgtgtgagaggagggacttgcctggtgtggacccgagtcgcggccacagtcatgtcagggttggttgtggcctcagatttggccgccccggaaccacccatgaccttgggctcccctggctgattgggctgcaggcgcccaggagccccttgcttgcacatcctgagaggctgtgctctgacccgcctctctcgctcttgaagacagaccccaaaggtgtcttcgtgctgccgcctcgtggggtgcaggacctgcatgttggcgtgaggccccttagggccggcagccgctttgtccatctcaacctggtggacgtggattgccaccagctggtggcctcctggctcgtgtgcctctgctgccgccagccgctc

SEQ ID NO: 855 - DNA, 739 bp, Homo sapiens
tcttagtccacccaactccttccctctcggctccttgaccgctcgtctctttccctgcgttacacttctgccacccactgtcaagccttagaccttgtcattaccagtaactgttgcctccgaagcctcagtttcaagcatcgcacctgataaccaccaccacctcctatctgtccagctcacttccttaaattgcctcccttcagcagctccaatcaacgcagcctgagaacaatggtgatgatgaaaataacagcactgccgcaacacttaccccatgccaggcactgtcctaaatgctttagaacagtattcaaaattgaacaagtgttcggtcacttgttcaatcctcacaacagccctaggaagtagccttattcttatccccattctatagatagggaaactgaggcacagagaggtcaacgaaggggcccaaatggattcagctagtgtgggttgagctgagatgtgtacccaggctgccaggctgggctccccattttcactctctctcctttcttaaccagctcagattttgtgggctactgttatacttcctcctttgcaaacagccccatctctggtctcccttgggctttgggctcactctgggcagcactccaggctgggcaagttcaactctgcttcttccacacctgcctggagcagctgcacacagccctggtcactgatgcactttccaccaactacaagccctagggaccctggtgccagc

SEQ ID NO: 856 - DNA, 739 bp, Homo sapiens
tcttagtccacccaactccttccctctcggctccttgaccgctcgtctctttccctgcgttacacttctgccacccactgtcaagccttagaccttgtcattaccagtaactgttgcctccgaagcctcagtttcaagcatcgcacctgataaccaccaccacctcctatctgtccggctcacttccttaaattgcctcccttcagcagctccaatcaacgcagcctgagaacaatggtgatgatgaaaataacagcactgccgcaacacttaccccatgccaggcactgtcctaaatgctttagaacagtattcaaaattgaacaagtgttcggtcacttgttcaatcctcacaacagccctaggaagtagccttattcttatccccattctatagatagggaaactgaggcacagagaggtcaacgaaggggcccaaatggattcagctagtgtgggttgagctgagatgtgtacccaggctgccaggctgggctccccattttcactctctctcctttcttaaccagctcagattttgtgggctactgttatacttcctcctttgcaaacagccccatctctggtctcccttgggctttgggctcactctgggcagcactccaggctgggcaagttcaactctgcttcttccacacctgcctggagcagctgcacacagccctggtcactgatgcactttccaccaactacaagccctagggaccctggtgccagc

SEQ ID NO: 857 - DNA, 1860 bp, Homo sapiens
gatgaactctccgcctcaggaacgagatggcggttctctggaggctgagtgccgtttgcggtgcccaaggaggccgagctctgttgctgcgaactccagtggtcagacctgctcatatctcagcatttcttcaggaccgacctatcccagaatggtgtggagtgcagcacatacacttgtcaccgagccaccattctggctccaaggctgcatctctccactggactagcgagagggttgtcagtgttttgctcccgggtctgcttccggctgcttatttgaatccttgctctgcgacggactattccctggctgcagccctcactcttcatggtcactggggccttggacaagttgttactgactatgttcatggggatgcctcgcagaaagctgccaaggcagggcttttggcattttcagctttaacctttgctgggctttgctatttcaactatcacgatgtgggcatctgcaaagctgttgccatgctgtggaagctctgacctttttgacttcctactttgaagaattgatgtatgcctctttgcctctgctttgtcatgccattaagctcacaataaggaagaaataacagataagtccattggtggacagccttcttctcttaatcacaagattattttcagaatttaactttgaggaaaaggtttgagaggaattatatttaagttgtgagactgagttctgtattctggtgagttaatggggttgcctcccagcttcttataagactcacagtataactaaacatgatatatcagcttttgccttttaatttctcaatctcttaaagagaatccagctttagtatgattagcatatgatcaaacttccatatttgccttgggaataatggactaagggaaatactcttaattcatgaataaaaactttgcagaaaattagacagtgtttaattttcaaaaacttccctctctagtcggtagataccacctaccgatggttacatatactagggaaattttaaaattaggaaatgctgatatctcatattataaatttctaaatcctaggaagaaacgcttggagtgcttctgaagatacagaagttccatttaagggcaagtttccccatagacgtatcaaaatattacccattgtaaactgagatttaattctcaaatgtattctacttgttctaaaacaatctgtccacaaatataaaactataagtaataaattgttattttcgcacaatgggaatctctaatgtgaaaatgtattctgtgaaaataaatttttaaataaaatgttgtataataataataattttaaaaaagatgaactgtccctgcatcggcctaaaggtatcagtgctcaaaatcccactcctgctttccaactcaaaggcttgactcttgcagttcatctctcttctgtatcatcagatttttcctctctatcggattattgccctcctgcttctcctccatttctctgttcccctttagagcaaagtccttggcagggctgcccctgcatgctgtctccactttctcatctcctgctcttgaatcagtcaagccaggctgttgccttcatcctcctctacaaccatgcatgccaaggtctccttgtcaaatccaatggctacttcccagcccttatccgacttgacctctcagcagcattcagcccacctggggccctctctttccttgccttccaggacctcacgctctcctgggcttcctcctgcctctccaagcacaattctgtctcctttgctggctcttacacatgtcccccctctaaaatgcagggtgttctaggactcagtcctcagacttcttcccatctctctttatcctcact

SEQ ID NO: 858 - DNA, 248 bp, Homo sapiens
tttaggggttaaagtcacatacacagatgaagacaaccaaaaattaataaatacaaacttccaggctgggcgcggtggctcacacctctaatcccagcactttgggaggccaaggcgggtggatcacctgaggtcaggagtttgagaccagcctggccaacatggcaaaactccgtctctactaaaaatacaaaagtaagccaggcgtggtggtgtgtgcctgtaatctcagctactcgggaagctga

SEQ ID NO: 859 - DNA, 248 bp, Homo sapiens; identical to SEQ ID NO: 858

SEQ ID NO: 860 - DNA, 1860 bp, Homo sapiens
gatgaactctccgcctcaggaacgagatggcggttctctggaggctgagtgccgtttgcggtgcccaaggaggccgagctctgttgctgcgaactccagtggtcagacctgctcatatctcagcatttcttcaggaccgacctatcccagaatggtgtggagtgcagcacatacacttgtcaccgagccaccattctggctccaaggctgcatctctccactggactagcgagagggttgtcagtgttttgctcccgggtctgcttccggctgcttatttgaatccttgctctgcgacggactattccctggctgcagccctcactcttcatggtcactggggccttggacaagttgttactgactatgttcatggggatgcctcgcagaaagctgccaaggcagggcttttggcattttcagctttaacctttgctgggctttgctatttcaactatcacgatgtgggcatctgcaaagctgttgccatgctgtggaagctctgacctttttgacttcctactttgaagaattgatgtatgcctctttgcctctgctttgtcatgccattaagctcacaataaggaagaaataacagataagtccattggtggacagccttcttctcttaatcacaagattattttcagaatttaactttgaggaaaaggtttgagaggaattatatttaagttgtgagactgagttctgtattctggtgagttaatggggttgcctcccagcttcttataagactcacagtataactaaacatgatatatcagcttttgccttttaatttctcaatctcttaaagagaatccagctttagtatgattagcatatgatcaaacttccatatttgccttgggaataatggactaagggaaatactcttaattcatgaataaaaactttgcagaaaattagacagtgtttaattttcaaaaacttccctctctagtcggtagataccacctaccgatggttacatatactagggaaattttaaaattaggaaatgctgatatctcatattataaatttctaaatcctaggaagaaacgcttggagtgcttctgaagatacagaagttccatttaagggcaagtttccccatagacgtatcaaaatattacccattgtaaactgagatttaattctcaaatgtattctacttgttctaaaacaatctgtccacaaatataaaactataagtaataaattgttattttcgcacaatgggaatctctaatgtgaaaatgtattctgtgaaaataaatttttaaataaaatgttgtataataataataattttaaaaaagatgaactgtccctgcatcggcctaaaggtatcagtgctcaaaatcccactcctgctttccaactcaaaggcttgactcttgcagttcatctctcttctgtatcatcagatttttcctctctatcggattattgccctcctgcttctcctccatttctctgttcccctttagagcaaagtccttggcagggctgcccctgcatgctgtctccactttctcatctcctgctcttgaatcagtcaagccaggcttttgccttcatcctcctctacaaccatgcatgccaaggtctccttgtcaaatccaatggctacttcccagccctcatccgacttgacctctcagcagcattcagcccacctggggccctctctttccttgccttccaggacctcacgctctcctgggcttcctcctgcctctccaagcacaattctgtctcctttgctggctcttacacatgtcccccctctaaaatgcagggtgttctaggactcagtcctcagacttcttcccatctctctttatcctcact

SEQ ID NO: 861 - DNA, 17379 bp, Homo sapiens
aaacattatttttgaatggtgaaaacagtgacattaagatttgtgctctaggagaagaatggagcttacacaaaatatatttatgtcaagtaagtattttttctatttgagtaacagggtagtcactgaaactcttaagtcatgttcttcctcattgcacttcacagtaatcttttgcatgaacaccatagtggttaaatcctctcatttgatcagtctgtaagaaaaatggcaaacattgttagtgaaaactaagtttggtctagaaagagattttgatatttcagtatcagactagcctaatactacgtatttgtcattacttcataaaatgcttttttcggtgccttctgttgataaaaggggaaaagttggggaaaaaatatttaacattaaagttaagattgtagtgtttattttgcttatggttatttaaattggataaactcatctgaaatgttgctttgtagttcacattgagtgtgaatagaaagttctctcctgaaaaatgcaggtaaagacaacaccaaaaagtatatagactaagtagatttctgtactgaaaatattactacctgccaccccactttaaaaattcagaactttcatagctgacgtggtgttgggcacctgtaatcccagctactcaggaggctgaggcaggagaattgcttgaacctgggagatggaggttgcagtgagctgagatcgtaccactgcattccagcctgggcaacagagcgagactctgtctcaaaaaaaaaaaaaaaaaaaaaaaaaaaatcggagctttcaaaatagaatacaatgttgctctaatggcccaaatattttattcattttctttcatcaaatctataagctaggtattgtttgaggcactagaaataaaacaacagtttttatcctttggaacttacatttttcctctttaccatttgagaataattactggtaagacagcatagtataaaatttttcagtaaaagtatttgaaaatgaattgccttctctaacattttaatcatgttttaaaatgtgtttttgaaacaaatttattttggcttgaagtatgttgcccagatactatatcagaatattgcttttaacttcagggtatgattcatgttgtttctttttaatatctgaaagcagttttgtgaacttgagggtaagaatacctctgttaaaactttacccctcgtggaagatgtattataattcaagccacatgctaaaatataagccccctgaggacagaaacaatatcgattttgtttattgctatattcacagtgccttctacatactaagtactcagtaacatttttaaataaattagttaatatttgatccatttcaaagtaattctaattatgaggagtgctatctggcagatacctaaagacttcattctgtacctttccaagaattcaggtccattctggacatttctcattaaactaaattttggattttccctggtttctttggcgatcatcctgtttttgctgacttgggactggtttggtcctttatagccattcaggtgtacagtaaagattcaacagtttgagtaaaaagctaaccaggttcaaataatatacatgaattcaatttagatagtaatataagaattttagttttttgtcaaaaatagtactaaaccaaaagtatattttgatacacctaatagtgtccttatcttaatttcttttctcctgtggacatatttggcagttctttttctgttgaagtaatagaatggatgagtttagttaatggatagaatagttgcttagaattagaaatgggcaaataatttggaagacacagaaagtacttgataatcgttgacttttttttttgtttaagtctggctacttttctagtatgttcagtggttcttggaaagaatccagcatgaatattattgaactggagattcctgaccagaacattgatgtagaaggtaactaccacaataattactattatgcaacaatcgtaaaaacataatcttattcttctggtagaagataaataattccttccagccttgtagtctagaaaactccttttatcacctcaaggtgataatttgatgttgatttacaccatagtttatcagttctgtccatcttatcactaatctgttttgtcatttgggccttatcagtttgtttacttatctttgtaaatatgcccacctgggatatggaagatgtaggatggaggaaggaaaagtatgaccatttttttttttaattacatagaaaatctgataaataatactgattattccctatgtatgaagatgttttctgggaacaataaataaaaatattgttttagagctaaaagaatccttagttgaggaagctgaggctcagaggagttaagggacttattttggatctcagagcagtttagtgagcctgtgtcagactacagctctcctcattcccattccagtgctcttgctgctcccctcattggtggtccacatggaagtacctggtgcgatacaaaggcaaagaaatactttagttaagaatatttacagcctgtaatcccagcacgttgggaggccaaggtgggtggatcacaaggtcaggagatcgagaccatcctggctaacatggtgaaccccatctctacttaaaaaaatacaaaaaattagccaagcgtggtggcaggcacctgtagtcccagctatttgggaggctgaggcaggagaatggcgtgaacccgggaggcagagcttgcagtgagccgagatcgcgccactgcactccagcctgggcgacagagcgagactccatctcaaaaaaaaaaaaaagaatatttacaaagcaaaccatgtgggacattcataacagtggcagtggaggaaggatgaacaggcatagatcactgtgggggctgggaatgagtgtggcatggacaggactcaggagctgtaccacatttctcagtggtggagtgctgaaagcagccgggttaagattatctttgagtctgcgtatttgtacttaacgattggtctactgaggagtatcttatacaacttcttgcaaggcatcttggttgtgaccactgatgtcaagattacatgttagaagaatgcagctagatttggtagaataaacagaaatttataaccttgttattaaattaacagtgtcaaccagtaaccattactagcgttttaattagagatacttctgttatccttttatgtgcatgccacatttagacggatgtctttgtgtgtgaagacagtcgttgttgttatttgtataacacttgtaatagatataaatattatttcatcctacatgtgtaccttgctttcagcactgcaggttgcatttggttcactgtatcgagatgatgtcttgataaagcccagtcgagttgttgccattttggcagcagcttgtttgctgcagttggtaagtatgcacgttattcgaagaaaggttcagaataataatctttgtctcaaagtgtgtactccaaaaacaaaaataaagcttagcttttttggagtttttaaataaaaatgaaatgtataaatatgacatttattataaatcatttaaaatgcctaaccaaaagcaatttattacaaccgagggagtcatgatgtctgcataaaatgaatgcaggccatttctgtgtagatatcttagtatgactataatgtggaaaaaacgtacttgtctaaggtcatttacagatttcattaatgacttgactattaagcagatggcttatgattaccaattaatttcattcatgggttcaaataaacatgcatgcctactatttaaatttctcttaattttgaaagaattgtgtataaatcacatatatgtattttaatctactggcagaatgacagatttgttcattgaagagaagtgtgttgagcactgtgtcaaactagacacagaaagccaaaggtaacttaagacgtaatccttactttcaaaaagttcacaacatagtatgtatgtgtggagaggggagggagggttgatatacaaacccaaaggtaaagtaagagctgttcaatattataggtatgataataaacatcctgtagcatttagtgaatggataaagaagggagtggtcagttcatcctggtggtgtcacatacgaaagttacattttcacacagagtcttgaaagtgtgtttgtattgcaaagtaagaagaggggaaggaagagcatttcagacagagagaacagagtaaactaagatctagtgatgtgaaataatggaggattcaagactctaacagaaacatggctcccacataaacataagaaggattgcagaagaggggggcagaagccagatcatgaaaatacatctatacattgctaagaagtttagcatacacagtacctttggaatattttaatcaggggaaagacgaagttatgttttagaaagaatacttcagtaacaatgtgacagatgaattgaaggaaagatgagtacagcattagagacaaaaacttgttgcattcgtccaagggaggaaagtagggtagtagcaataagcttggaggggaaaaagtggataccagagagattcagggataatccactggacttggtgatagactaaatgttaagaggaaaggggaggagtctagaatgatttccaggtaagtttaaaatcctaatggagtcaatgttttattttaatcttaaaaaattgtttacttttatgtggtatttttgtactgatttatttgaagtattaatagcttgctaaatatccttggttgagatcatttgattttcaaaatgttttgatcctttcaatacttacttccaataagtatactttattatctaactctggtccttttggttttgttctaaattcaccttctgcttacttttatgatttactaactctttaacttaatatacctgcatgatgaatgtatttcagaaatttgaatgaaaagtagtattcttcccatatattaaagttagttcacttaaaacctatataaacattttaggttaaaactttaatgttaatcatttgaaataataatatacttgttttaagtctatctcttagatattgtagttattttaaacttgatcactttctgctaatgcatactgttagtttagtcccatcacatggttaactgactatgtagacttcttaatttaaaaagaaatggcaaaacagacaaaatgctgctaaagaaatttgcaaaggtctcagacaggggaagaatagaaaagaaaaagaatagcagtattcattctctaccttactactcccccccaccttccattttcaaattccaagtatttagttgaatacttgctgaacttttttcagtatttttattggacttgttaaaaaaaaaaaaaaaaacttaggtttgctgcacttaatgagttttctttcttttctttcttctttttttttttcttttactttttaatatgtaaaagctgtcagagctaatttttcccacgtgaaatgggcctttccagtgcttatttatatttacaggacggtttaatacagcagtgtggtgagacaatgaaggaaacagttaatgtgaaaactgtatgtggctattacacatcagcagggacctatggattagattctgtaaagaaaaagtgagttgcctttcttgtttttcttcctatcccacttttaggaatttggttgctttagtttcttaagagaatgtatagctataagaaagaaagaattaaggaaaaataggatagggggatggaattttattaaataaaaagccccttttaacttttggactaattagtaaattcctcaaaagtgtcgtctttgtaagtgaccataggtgggttatatacatgcttataaaaaccatggtcaccttggtcgggtgtggtggctaacacctgtaatcccagtggtttgggaggccaaggcagaaagatcacttgggcccaggagattaagaccagcctgagcaatgtagggagaccccatctctacaaaaaattttaaaaattagccaggcatggtggcatgcacctgtggtccccactattctggaggctgaggtcagaggattctttgagcccaggaggttcaagactgcaatgagccgtgatcatgccactgcactttatagtatattttctattaaaattgtttaagaagtaggcctgatagactgacagtccttctaactcttgagagttgcagtacctgttttgagattttaaagaaggttatactagtatgcagaccccttaataaactatttaacacaaactcaaaatgaagttttaaaactggaaatgctctcgttaatataaaggaaatattctcttaataatatccactgacaaaaataatactaaatttcctattgttaagctaaaagttttgagcatgttctggcaagattaatctgattttattttaactataagtcctacttaataaattgtaaatacatggcatataatgtaataattatatattttaatttcaggtgccttgaatggcttctaaacaatttgatgactcaccagaatgttgaactttttaaagaactcaggtatttgaatttcaagtaacttcataattagtcatcctaaaatattgtttatcatttgttaaagtacataacatttttgtagaacacaaaaatatattatgaaaaagcaaacaatttaatgaaagggcttgactacatccataaactgaagaaatgctgtgcaaacttatttctttgttgtgaataatataatggatattatgtctactgttttaaccgaaaaatgcattactgttataagactatagaaaagtttcaggttttgccaggctgttagagaatttaaaagttatattttaaaaatcatcttttttattgagaaataagtttgaagaaactgttttggcctttttttttttttttttttaccttcaaaaacttttcatgttgatccgttttctcactaggatgaattctctgatgtggagtaacaaatgtgtgtctcctataaatgtatatttttccatctctgattatttcacaccttgaatccaaatctgtagtcccagctactctggaggctgaggcaggaggattgcttaagccatagaggtcaaggttgcagtgagctgtgattgcgacactgctctccagcctcagtgagagtgagacaagttaccatggttcttcaccgtcacctcctggtacaaggtcttctgaaccaggtcaaggtattcccactcctgatgagagaagtctgtggccatgtccctgaatgttacaaattcacaggccatggttttagacaagcaaaagccaatcagtcctcagggtttctctaccagaaaagcgatttgggaaaacctagacctataatcccagcactttgggaggccaaggtgggaggattgcttgaatctaggagttcgagatcatcctgggcaacatagtgacatcccctctctttgagaaaatatcaatcttcctttaaaaaaaacctgttagcgccacacagggtcccatgcaggcttcaggctggggctgcagaggctcctgcagtcaactgcgccgccttcgtcctcaagcgggacctggtcagacgcagcacagcgcagagccagaggtcctggagatggagccagaggtccaagatttctccatcacctgtggactatgtagtccaagctggaataataggaccgcagtcacccgtgagaaatggattccagggttctaaaaacctacaagaaatatggcggtgacaatgaggactgcccaccctgcccaccacccaagctgcagagcagcctttcttttttaaagagatgggggccttggtatgttgcccaggctagactcaaactcctgagctcaagcagtcctcctgcctcagcctccaagtagcagggattataggcacataccactgcacccagcttagtttggctttttggattaagtacgcatattatccatttattcctgcagcaagtacttcctgactgtcctttatatgtaaagatactctattaggggctgtgaagaatgcagagatgattttgtcatggtctcttgctgtcaaagagcttatttgtagtaatgggactaagatatttgtgatgggtctgagaaaatctggctagcagttaacttttgaaggctggttggcattacagtcattttctggcttgcatttccctgacagcagtgcttctgagacaaggatacaaatgtgtccgagagtatgtgacattctgatggaaatgtacaaaaccaaagtcaaacattacatagcttcccagaatgtgaattttactgattttttttttttttttggtggggaggaggtggggaagaggtaaatatttttatgtttaaatacattatggaatagagggaattcaaatttccttgaactctcaagatacaatttatagaaatgttactttttatggttagaccacctcctagattatggggtttttttcctttcttttgcctttacgagataatttggtagagaagtgtgagagactttcatcacctggtgatgtcaaggcataaataaatcaccgtagaatgtttgatttgaaaatcgttagaaacactttaatacagtcaaccctgcttatccatgggttctccatttgtggattctaccaactgccgattgaaaagatttgggggaaaaactataaaaaataataacaaaaaaacccaatgtagtatgacaactattgcataacatttacattgtattaggtactgtaagaacacctagagatgatttaaagtatatgagaggatgtgcataggttacatgcaaatactatgccattttatataagggacttgagcatagaggattttggtatttgtaggaggttctgaaaccaatcccccacagatacagggggatgactctaatttctcactgaactttttgaaaaaggagcaggatcctcttaaaaacccacgtgctctcttggctttttatggctcaaaggaaagaaagaacaaaggaaaagcaaaacaaaacaaataactggtgatatcattttcactctaaataactagcacgtttcttgatcttattgtcttgaatagtactaaaaccatagtttatgactaagcaattctcttaagcctagaggttaaagattactttgacgatatagctgttttagtgtctttttttttttggttttggagacagtgtcttgctctgttgcccaggctggagtgcagtggtaacagtcttggctcactgcagcctccacctcttgggctcaagcgatccttcccaccccttcagcctcccgagtagctgggactacaggtgcacaccaacatgattggctaatttttttttttttttttttggtagcacgaggtctcaccatgttgtccaggctggtctcaaacatctggcctcaaatgattctcctgcctcccaaagtgctgggattacagatgtgagccactatgcctggcctttttttaaagaacaaaacaaaacgtagaagtggagtggtggaaggcaaaagaggaagactgccattttatcagagcatacttaaagttatcttaccggaaccttgctttaacttgattaatcagcagatcagagctctttgtttccctatcagtgtgaaaaggacctttcacagcacactatctgaattaaaagtatccttgtatccagatagattgcactatctgaattaaaagtatccttgtatccagatagattgttttctaagattctttgtcttgggcagaaggactgctgtcatttttaattccacatatttttttacaagaaagacttaaagcttttatttctaccaggatcctttagcctgtgcctaaagataagctcactccctctatttatccttttcagtataaatgtcatgaaacagctcattggttcatctaacttatttgtgatgcaagtggagatggatatatacactgctctaaaaaaggtactgacgtaatatgatgtcatattatacaaggatgtcacctcagcaatgcgtataatggtgaaaaactggaaacagtatccagtaataaagggatggttataaatgtaggaaaaggaaataggccgaaaccttaaaaagtctttatatttagggatttggaatcattagtgattttaactttattttttgtacttttctattttaggaatacttttctgttttttcccagacttttctttaacaaaaaatatgttattgctatttgtttatttacataatcaaaaatgttttatattgtttttaggaacgttttcaaagttgagcttcagttaatgatggcatttttacacacgctttttctaagaaatgttgaaatttttcttttaaaggcctgtttgtgtgtctggcatatgttttacttcatgcttttgaaaagtttcaacatttaaaaaatctaattttattttcacaactctttgaagacacagatcagccattattcttccatgtagatagtgagactcagagcaggtttgaggcagagactgggtcttgggagtcctagtccattgccctcttcctactgcataatcctgcctttacccttttgtccgcaaaacagtgttgtgagtatttaacacagttgtgaaacttcagactgagacactttctagcttatctcatagggactctttgtttgtttgtttctatggtagaggtgaaattttgttactgtttttcttcaaggaactttactatctgggctatccaatcttttaaaaaattggtgcagaggtcaggcacagtggcttacgcctgtaatcccagcaatttgggaggcccaggctggcggatcgcttgaggcctggagttcaagatcagcttgggtaacatggcaaaaacccctctctacaaaaaatacaaaagattagctgggtgtggtggttcgtgcctgtagtcccagctactcagcaggctgaggtgggaggatcacctgagcctaggaggtggagcctgcagtgagttgtcacagtggcattcatttctgttattaaaactgctttttgccagtaatggtaagtactaatacttacaggatgtttacgtgccgtgcaccattctaagtatttatgtatattaaatattttaatgtcctatgaggtaaacatattatcatgctcattttacaaatgaagaaattaaggcccagagatactaggtaatgtgcccggctcttaagtgccaggttcaggatttaaaagtttttgctcttacctactctgcgtattatctcagcagcagtaagacaaagaagctcctttttcccatgttcatttcttgcttttataatctcatatagtatttagtgaaattgagttgttagtagaataaattagtataaaatttctaattaatatacatatatattaaacctttacctttttaatacagtaatctccagtgtgttaccataaatacttctgaaggattggcttactccttagcacacacatccaatttttatcactggactatgatttttttttcttttttcctggagacaaggtctcgctctgtcacctagactagaacatagtggtgcgatcatggctcactgcacctcgacctctagggctcaaaaggttctctcacctcagcctcttgagtagctgggactccagatgcataccactatgcccagctagttttttttctgtgtgtagagatggggtttgaccatgtttcccaggctggtctaaacctctctcaagtgatctgcccaccttggcctcccaagtgctgggattataggtgtgagccacagcacccagccattggactatgataatgccatgataaattgagtgcttatagttgtactttctttcttgcaattgctggtaaagtagaagttaaattttttagctattatattttaaggtgaaagcaatttgaaaatgtaaaatcataaaatgatgaaatttcataattgttttcttatttaattttttttaacttagtggatgttccttcaacttgtgccttcttggaatggatctttaaaacagcttttgacagaaacagatgtctggttttctaaacagaggaaaggtaggcctgaagtttttgagaacttgtcttttaaaaggaaatttgttaaaatcaggccccatgagaacagaaaataaataaattaattaattaaatgaaatcaggccctgacttgtttatagacttaattttagagcttggagaagaccttagcaattatctacttcacccctcatttacagtgagaaaatcaaggctagataagaaaaataccttaactatcattatctgaattgttactccttgaactgtcatcatactcttgatcgccaaaaactattgtttttcccattttatcactaacagatcttgttgattgcatttgtcttgaccacactgagttttctctaacaagctataccccgtcaggcaaccattcttaacataggggccatagataggctttcatgtgtcactgactcccaaaagtgggtacagaatttgatatgtgtgtgtgctgctgcatacatttgtgagaggagagcttccataccttccgtcagattcttagtggagactgatctaaaattggttaagatcaactgctataaggtcttatctgtgcaaaggagggcatgcaatataaaaaaaatacatgtgtatactaagttaaaatgtatgtatgttattttttactttgctaaaacatatctagaaaaagtattttttacggctgtcaggtgcaaagaactggataaatccttagttcgtgattttcttagtttatggccacctttttggtttatttttaatacgttgagcctttgtgacctaatctttgagtactagaacatcagtaacttcagtcttaactcatgtgcttcttttctattgtgtccctctgacttttcctaaccactatcttgaacttcatgtttattcttttgctttataaatatatattattgcaccatgtatatacgtcttaacatatattacatagtggtgtgctaataagctgactctgaaaaaataatccttgattagtaccatttcttaattcccatggtacaaattttcccatcatggctgattgattgcaagctaccaacatgacatcactgaatgagaaaggagatgcacacagctcctatgagctagcagcaacacgccactgtataatatatcattttgttttagttgttatggaactatgtcacattgtggccttaattttaatgtcctttataactaaagagattgaatgactcttaatatggttattagccatatgtttcctcttctgtgagatatctgttcaggtatgtttcctattttaatgtcagatttgtcttttcttattgatttgtaggcattctttatgtattcctgataactaatcctttgtcatacatatgttctgcacttccagtttgtaggttatctttttaatttattaaagatgtctttttggttgggtgccgtggctcatgcctgtaatcccagcactttgggaggtcaaggcaggaggctcacttgagaccaggagttcaaggacagcctgggcaacatatcaagaccctgtccctacaaaaagtttaaagaattagcagggcagcctggcacggaggctgatgcctgtactcccagcactttgggaggctgacgcctgtactcccagcgctttgggaggctgaggtgggcagatcacaaggtcaggagttggagaccagcgtggccaacatggtgaaaccctgtctctactaaaaatacaaaaattagccgggtatggtggtggtcgcctataatcccagctgctagggaggctgaaggaggagaatcgctggaaaccagaaggcggaagttgcagggggccgagattgcgccattgcactccagcctgggcaacgagcaaaactctgtctcaaaaaaaaagaattagcagggcgtggtggcatgtacttgtctgtattcccagctactggggggaggatcacctgaccctgggggtgtcagggctgcagtgagccatggccacacaccactgcactccagcctggacagcagagtgagaccctgtctcaaaaggaaaaaaaatgtcttttgatgaatagatattcttagttttaaaatttcatgctctttatatcttagttaaatacattttatagaattattttatgtagtcaaattacctacctcagagccagataaattaattttctataaagttcctgaagtaaaaatgtgtaaagaaccatatcagtgaaatataacttgatttccttgaagaacaaaaatactaaacttgtatcttaaattatacttttgtgttacgttatggcaattaaagaaggactagggaaattatagaggagaaaagtaggggaaagcatttaaatagaagagagagaaaagctgaaagagacaaggatggtgaagaagttaaaaagacaaagagactcagtagaaacagtagatattaggcaaatgttgatagaaccttatgatcatttgtgctccagatagatccaccacagcaatcaatcaaaagagaaattgccctgtagcctaagtggcagaaactagagaagcaagctgtggtccacttctggattcccacttgaggctctccctcccagcccctgaggtgtgaaagtatacagttcaagataacttttcaaggagacattgattgcacaaaccaaaatgtatgtctgatgctcttgtttttctatgaagattttacagagtcattttcaatagttttaaaattataaataagatgcatacttaggaaataggatagaaaaatcacctgtgatccctcactcgttatattttggcatatgtctgtctgtctttttttttttgagacagagtcttgctctgtcacccaggctggaagtgcagtggtgcgatcttggctcagtgcaacctccacctcccagattcaagcaattctcctgcctcagcctcccgagtagctgggactacaggtgcatgccaccacacccagctaatattttgtatttttagtacagatggagtttgccatgttggccaggctggtcttgaacttctgtcctcgagtgatctgcctgcctcggcctcccaatgtgctaggattacaggcatgagccaccacacctgccatatatttttgtatatttcttttaagttttcttaattatttgacttttcagatctatatggatcaggactacaagaaacaacagaaatttagaaagttttctacacaattatacttaaggattgctattgaatttggctgatggaataagtatggccacatgttgtccagcaagaaactttaaaacattttttttggttctataaattcttacagaagtaaatgagccagtctcttctacagccgtgacgaaaaggcttcatgagttagaatcaccagatttctatgagacaatccagaattagatttttatatcttgttcatgtgacagaacacttgtaaaaacaaaatggtattctcagcacaccccctgaaattggcacatttaattcaacatatgaactggaaccaatgttgttatttttaaactcaagagatataaatccactgtcacacacctgttgtataaataagtgaagttaactattaattttttaatgaatttactgctttcttgtttgctttgctgactctaggcaggtgccaagggaatacaaaaaatatatgagataatgtggaaattcttttcattaacttggctgtctttttacaattttcaggaaaaaaatattttagtggggaacaccttctggtctacagaaaacctgtgttccatgtgaagcatggtttgagacataatagtctataatggcaactgtcatgtttttctccttatccttaatagcaacaggactgggtatacatactctcctgggtatatgtcgtttaacagaaaacatagactagggctcatgcacaaatacctgtttgatagcagtaactctaaacctttccttctgactcatgaaagcacactggaatgtaactgagggtaatttttaggaataaccttaaattctccctaaaagaaaaaaaattatatacttcataaacttgaattattctattttcttttctttttttgagacagagtttcactctgtcacccaggctagagtgcagtggcgcaatctcagctcactgcatcctctgcctcccgggtttaagcaattctctgcctcagcctcccagttagctgggtttacagatgcccactaccacacccagctaattttttttgtatttttagtagagacagggtttcatcatcttggccaggctgatcttgaactcctgacctcgtgatccaccctcctcggcctcccaaagtgttgggattacaggcgtgagccaccacgcccagccaaattattctattttcagtattattattattattattattattattatcattattacttattttagagacaagttcttgctctgtcacacaggctggagtgcagtggtgcaatcatagctcactgcaagctgaaactcctgggctcaagcaatctttccacctcagcctcctgagtagctgggatcacaggcgtgagccaccacgcctagccatacagtgtctttcttattttgtatttcaatagagaattaatatattaactagtgttcattacatgtagctgaaatgtaagttaaaagaaattaagagatattctttgtcctgtgtaccttatccttgagtgaggcttttgggctccagagtttcactggcctgttcaggtcttgggagggggattctggcgagaatgtgtaatcctaagtacctttctcaagccttcctttcccaacttgctgcactatacatgccaaatgcccagaaacagctgaattcccagcctgggggtttcattaagaccaaagttaatttcctgggattttaaaataaatctccttatgttcttatctgtaaacctaaggtttataaaattcttgagaactttaaaactagcttattttgtattctaatagacatgaatgtacgtatcccccgtccacaaaaacatttaagaataataggtttgaaaagaatggctgtttaacttacatggttttttatagattttgaaggtatggcctttcttgaaactgaacaaggaaaaccatttgtgtcagtattcagacatttaaggttacaatatattatcagtgatctggcttctgcaagaattattgaacaagatgctgtagtaccttcag

SEQ ID NO: 862 - DNA, 462 bp, Homo sapiens
gattaattgggggtgggggagggtccagctcggcctttgaatccatgttcattgaggagatatccacagccttctttgaatgaatattcactcacactttggattccatatcatgtgctacatgtatatcatcgcacgtcattctcaaaacgtccctttaaagtaggtattagcatccctctgtggagaagggggaagggaggctcaaacaattaagtgcccaggattaattgatccactgctaagaactggcagaacggagactggaatccggcacccctgacttcactgtattttccaccacactgaggttaactatcattttcccatgtcaagtgttctgcgggtattttttagcaagagggaaacaaccttggagggacttaaaagataagacaatattcctacaatgcagattcttctgtcactcaaagaatgcctggggatcccagctgattttca

SEQ ID NO: 863 - DNA, 462 bp, Homo sapiens
gattaattgggggtgggggagggtccagctcggcctttgaatccatgttcattgaggagatatccacagccttctttgaatgaatattcactcacactttggattccatatcatgtgctacatgtatatcatcgcacgtcattctcaaaacgtccctttaaagtaggtattagcatccctctgtggagaagggggaagggaggctcaaacaattaagtgcccaggattaattgatccactgctaagaactggcagaacggagactggaatccggcacctctgacttcactgtattttccaccacactgaggttaactatcattttcccatgtcaagtgttctgcgggtattttttagcaagagggaaacaaccttggagggacttaaaagataagacaatattcctacaatgcagattcttctgtcactcaaagaatgcctggggatcccagctgattttca

SEQ ID NO: 864 - DNA, 502 bp, Homo sapiens
taaaggggctctggcaagagggggataaaggtcaccacccagttaggagcatcatggagcacagctgagtccctggattcttactgagctatgttcttcattcacaaatagactccaggtaaagcagctccaaaattttcaggcagaaaaccaaactggaaaaacttgaagctctggaagaatatccagctggatctggcccaagaaccagtggcttctaaccatgacctgaatccatgacaactttcatttcccaccattaagtaggactctgtgctgcactttttatttcactggcatggttgtttgtgtatgacccagatgagcatcagcatttgctgtgaaaggatggctaggaaccaaggatgttgaagacagtctgaagttgtcactgcttatgtttcgtctctgcaactggctggttggttggtccatcagccggtcaacttgtattcttgcttcattctttcattgttttcatggtcatggatgttcccaattt

SEQ ID NO: 865 - DNA, 502 bp, Homo sapiens; identical to SEQ ID NO: 864

SEQ ID NO: 866 - DNA, 492 bp, Homo sapiens
cgtcaaaaaaaaaaaaaaaaaaattacatgtgtggcttacattggtgactggaattatatttctgctggacagtgtagtgggctgaataatggccccaaagatttccaggtcctactccctggaaaccgtgaattttattttacaaggcagaaggaactttgcagatacagccaagggtatggatcttgagatgggagcttatccagaattatctgcgcagactctaaatggcatcacaaagtaggcagaatgcgatttgacaacagaagagaaggaatttgactgtggaagcagagatcaaggtgattgatgtgggcagccaccattaacaggaagaaacaagcaaaagaatctttctcccccagagcctccggaaggaaccagtcctgatgacactttgactttagccccataagactcattttggacatttggcctctggaactataagagaataaatgactgttgttttacgctgctagatttgtttt

SEQ ID NO: 867 - DNA, 8272 bp, Homo sapiens
  SITE (4839): n equals a,t,g, or c
aggtgaaggaggccatgcagcggattcacgaccgagggaacattggcaagttaattctggatgtagaaaagaccccaactccactggtgagtgaaaagcagaggagtctgttcagttccacgcgagagagcaccacgggtcaatcagatgcagacacgggtggggtagaaggaagtacaggtagcctgtgggctagtggaggagaccaggggtaatcaaatgatgtcatacatgagggattcatgacaaactgagatgaatgctgaaaaggaaaggccagtgcttcagtgagagcatatcaaaagcatctgaaggcataggcaggaaagcatagcaacaacagacctgtctattacagctgctagctcttgggagaaattcctggaaaatttcaataatttcacattcatgttcctaacagaatgatgccagctgcttccgagatgctccctgatggttccacagattttttttttctttctttcagagagagagtcttaaactctgtcacccaggctggagtgcagtagcactatctcaactcactgcagcccccgcctcctgactgaagtgatcctcccacctcagcctcttgagcagctgagactacaggagaccaccaccacacccagctaattataattattattggccaggggaggtggctaacgcctgtaatcccagcacttggggaggctgaggcgggtggatcatctgaggtcaggagtttgagaccagcctggccaagatggtgaaaccccgtctctactaaaaatacaaaaattagccgggtgtggtgtcaggtgcctgtaatcccagctactggggaggctgaggcaggagaatcgcttgaacctgggaggcagagattgcagtaagccgtgattgcgtcattgcactccagcctgggggactagaatgagactgtctcaaaaatgataataataataatataaaataataaaaataatgtaaaatataaataaaaatataatttaaaatattatttatattatttttagagacagaatctcaccatgtgcctaggctggtcttgagctcctgagctcaagcaatctgcctacctcggcctcccagagtgctgggattataggcgtgagctaccacactcagctgtgattttttttttctttcaccagaataaaacccttatatcccagggataccaccaggagtatagcatgtcaaactcacatcccacctattctccctggggcctctcgaggaggaactatgtagtggtgtggtcagtgcacagaccatccgactgcatggattcaaaaccttgagcccctgtttatgacctgggcaagttacatgactactcagctttgatcccctgtcggtaaagtggagattgataagttcccagttagaatagtattcataaagcattgtctgatatgtactaagttccaggtcatctttttttgagatgtagtctcactttatcacccaggctggagtgcaatggcacgatctaggctcactgcaacctccgcctcccgggttcaagcgattctcctgcctcagcctcctgagtagctggcattacaggggcccaccaccacacctggttaatttttgtatttgtagtagagatggggttttaccatgtgggtcaggctggtcttgaactcctgacctcatgatacgcccgcctcagcctcccaaagtgttgggattacaggcgtgagccaccgtgcatggcccccaggtcatctttaacagaaaaaatattcgggaagtgtttcttgtttcttcatttacatgcacattgattcttgaagctgcatcagttctttaaaaaaaaaaaaaaagaactaaaatttcttgcatattgtcatgtaaagtgtttttttgtttgtttgtttgagatggggtctcgctctgtcgcccaggctggagtgcagtggtgcgatcttggctcactgcaagctccacctcccaggttaatgccactctaccgcctcagcctcccaggtggctgggactacaggcacctgccaccatgcctggctaatttttttgtatttttagtacagactgggtttcaccatgttagccaggatctcctgaccttgtgatccgcccacctcggcctcccaaaatgctgggattacaggcatgagccaccgcacccggccaggagtgtgtatttttaaaagtatttccttgacttgtaaccataatgtaatttgggtatgacagtcatttcattcaatgaaggacaccttcaacattgtaaaacaccctcttgttaagtgactgatacaacatggatataacttattaaatacttactaagttccagggctgttcaaagcagatgagagggcaacgagagggaggggagggagtgacttggatcctgagtctcctgtacacctctttgtagtctttaaacatatgaccaagtctctttcagtcccatttggagaaggcagacaggctctaggcccatcctggaagcttatggctttcaagaaaatagttggcaccaatttcccaccctgggatgctcctgtgtccatcacacatgagttgctcccaagtcctcgggctgataggaaggcctgtcttaccaagggaggattcttactggagcagatgctgaaaaatccacctttcagggtaaaggcacaggatctgcctgtgccacacacaatgtcattgtccttgtttctgaacctcctgaagccttcttttttgaaatgcagtctcactctgtcacccaggcttgagggcaatggcacaatctcggctcattgcaacctctgcctcctgggttcaagcgatcctcccacctcagtctcctgagtagctggaattacaggcacatgccaccacacccagctaattttttttttattatttttagtacagacagggtttcaccatgttggccaggctggttttgaactcctgaccccaagtgacccacctgccttggcctcccaaagagctgggattatagacatgagacactgtaccgggcccccttgaaggcttttatccctgggacctaaagaaacaaaaagacagtagagaatgggtattcagagcaaccacgtggtggaaaagaggctacggcctatctagatggaaaagcagacttgaaggaaagggagcatgtcttgaggttaaacagaacacatggagatgccaggagggatccagtgaggtcattttagggttggcacctgacagaagaggaaacaactcaagctccaggctccacaggatgtgtcgctgtccgctcagcaggtgctggaggaggggacagaggcgcctgcagaggtgctttctcctactggaatgaccacttttttttttttttttttttttttttttttttaaagacagtctcattctgtcacccaggctggagtgcagtggtgtgatctcagctcactgcaaccttcgccttccgggttcaagtaattctcatgccacagcctctagaatagctgggattagaggtgctcaccacaccacacctggctaatttttgtatttttagtagagatggggtttcaccatgttggccaggttgttcttgaaatcctgacctcaggtgatctgcccgccttggcctcccaatgtgctgggattacaggcgtgagccaccgcgcccggccatgaccactatcagccctcactcagccccgaatctgcccagccagcatgctgcaggacacacactgctcctctagaatagtctgggctctaaggcgtgtgggcagcacccaggcaggggaagtcgactgctactggcagctccagaagtaaatttcctgggaagcactaagagtggagtctctcctgctgaaagcctcctcttaatgaggctggaccaaagcaaagtcgaaactcatcctatgatgtgtcatgaggtcagagcagaggcagaactgctgcctccagaccccacagtaccagcgggcagccctgccccagtcctggccatctgaccagtgccccagagaatagaggtggcctttcctgaaggctactgacctctgctgcccttatggattctgtgttcacatcacctcagggtctccctttccactgctgtagaacagaactaacaacaataattactactattgctgctacttcaaagagccatagagaagattaaaagaaccagtgtctgtgagccaattggcatattggcgactatgtattataatatacactactaaggaacagcttagctggttagttcttcattatccttaaacacttgttgcatatgtacctagtggtagggaagaaaactgcagagacatggtcctctcccgtggtgtctaccgtttggcaggggcagatggacattggccaatgagccattcatataaatgggacattgcagctcttgatcagtgctacaaagaagaggtatttgggccatgaaagctcataatagggagatgttccagttagggaattctgcaaaggcttccttgaggaagcaggatgagccctaaaggaaacataggtatggactggatgaactgggcagagggggtagaggaatgacattccagggagaaggcactgcacatggtgtggccaagggggagaacccagcttcaggtgagacaacatggggagagctgagattcaggggccaaattcctgtttgtcagaataagccatgaagcagccagggactcaagtgtgggagatctggggcccaatctagatcaggggataagaacagaaaagaaatctgaggcacagatcatgtaggggatgttaatggacagaactagtttgttctgagtctctgtcatatgctcagccctntgctagactctttagatacattactccattttctttcacctggttcttaaaacaaatttataaggtaggtggatttatcgccactgtaatgatggcggaaatgaagacccagaggggtaatcataactatgccaggtaccagtgattaacaaaagaaaaggagtcaggcaaaatccctgtcttcccagaaactatattccagttgggggaagagagaccaaaaagcagatcaatacacctttgttctggttgttgtgtctgctcttcttaagtgacagcatcaagacttcaaccctggggactctgtgcagctgatgctctcaatacccctacacacctacccctatggcattcgggtcccctagcgctccaggggcacctacttagtgggcacctgcccctactctgcctgagagctaactactatgtcaccaagagcatagcttgagttttagcacagaaactgcgtggggtgcagggagataactcacctcccctgagagcagcccttagccataacatggcttcctcctccctcagaagagacagctctaagatgtgtcccccagggtctctcagaggtccccagcaggactgagtcccactgcccacacaggaaccaacttactaacataccctgcattggattcttcccctttttggtctcatttcttcactcccctgctactgcttcctgggatcatctcctaaattccagatactggtattcaaatccttatctcagcaccgtctctcagggtgcccaacatatgacagctaatcctgcattgccttccagggaaacaagcaaccctagttcctagcccccaagaagtcctcccataggactctgtcagatgctcagagatgacgaggctgggttgcacaaccctcaataacatcctcttttgaattacagatggccaatgacagcacagagaccagtgaagcaggggaagaggaggaggaccacgagggagacagcgagaacaaggagcggatgccctttatccagtaactgaggacccaggtgggagaatgtgaaggatggtttggaagatgaggacccggctgagaaaactcttctgtgccccagtgaacaaatgctgtagtccagtgcgtgtcgtgtttgtctgcagtcagctgagctaaaaagctgttgatcactgttgttttttgaagtgccaatcccatgccatgcagtattatgtccctctcctatctgtgtattacacattcccctctcccctgtatcaaaaccatccatctgtgggttcttcttgcacagttctagaacagccttgcaaattaatacaagtcccaggcccaatgcctaagagaccagacgtgggcaaagacaagtttggatggaaaggtgttatcacagagccctgtccagctcctagaattcctcaggccagtgacacttttttgctgctggccacccatgcctctgatgagaacacttgccaatttggccagcagaaagagagtaggccagatgttttcatgagcccacaaatttagaaactctcctagtagtactttttctctctccatttaagagacaactacggtcaaaagttgagccattctcttctaccccttcagtgtctgaccctttcactggctcttatctgtgaacacagggaggaaggtatggattttgtcacagtagacaatgggtcaacagcatgagtttgaggacctgctgtgaagatttctcctccaaaatacatctcatgggcaggattcttcctgctccatatctgtttcaattttaagaaagcaccacatacaagacacattcagaagtcattcctgagcattgctggtgtttgcacacttgccacctgcattaccaattctgtaaatttcaattcctggtggaaagtgaccactttgaccatggatttcccaaagaagagttcctttgcagaccataggtggaaaagtcaatgagcatctccttccttgccaaagcatgtcccaacatgtaacaaactctagggatacaaaaggtttatattcagcatctgatgtcagatgtacagttcctcccctcccatatataaaccccggtgtagaatctgcagcgccctgctcttcggaaaccaaggaacaagccacctgctcacacaccttgttcaacttttcagctcctaaggaaccccacccccatgcaatttgactgtgcttgagaggtgaatacagttaccttcgagaaacagagggagctcctcaccccgtccttccagtcctttggctaaaatgcttaactatcactcacaaacaaatgtggagataccaggagctcatttgattcataccccaactttgtgttctgaaaaacatcagagggattttacattgcccagtttctccaccaacaagccttagggtggacccaaccctttccgcaagtggtaggaacgaatgcatcttagcaattacctgatttccaaagtccttttgtagcaaatgtcacctcattcgtggtctttttacctatcctaagcttatgatgatgagttatgtatgccaaatatttatctgaagagtttctcctcattgtgaatgtgtatgtaaaatatgaagacaagaaagggtgctttcatctgaggaaccaaggggtgggagtatcccaaaggaggacaccagcatcatcttttcttcgtactccaggacccaccaatattccagttctgggtcatttagagagataatggggcgtttattcccctattacctttgctaagtgctatattattggctgtttctcccgtaaccatgctgaaaagggggtcttagggagaactgtcatccaagtggcattcctagtaagttgggtagaaatgacattttccagagctgaaggagtgaagagcccttggccatactagggctctccttcccccggggagtgggaactcagccacattcagaattcacatcgcctttgttatgtccagaggagaggcataaaaaggcactctcccccaccacccctaccaagatctgggtttggtttggttttatttaactagcaaagttaatccagtaatcgcaaattactccagatggttaaagaaaacccttattcagaatacagaacgagaaaactagagtttgaccaataagaccaatttctgccatgaagaaccgggggacgcaagttaattgtttaacgtactctcattttaagcaccttctttcctgtctcttgattgttttttctgaaggaagtgtaaagaatgtctcagtctgccttaaaggaactgtgaaggcttctctgtaatttaagcttgattgaagtgaactgaaacattgtctaatgtctttgtggctttagagcttttgttatattgtgcctataaagcaaattatgtttacataaaaatataaataaagtattcagcatagcaaaacctca

SEQ ID NO: 868 - DNA, 8268 bp, Homo sapiens
aggtgaaggaggccatgcagcggattcacgaccgagggaacattggcaagttaattctggatgtagaaaagaccccaactccactggtgagtgaaaagcagaggagtctgttcagttccacgcgagagagcaccacgggtcaatcagatgcagacacgggtggggtagaaggaagtacaggtagcctgtgggctagtggaggagaccaggggtaatcaaatgatgtcatacatgagggattcatgacaaactgagatgaatgctgaaaaggaaaggccagtgcttcagtgagagcatatcaaaagcaatctgaaggcataggcaggaaagcatagcaacaacagacctgtctattacagctgctagctcttgggagaaattcctggaaaatttcaataatttcacattcatgttcctaacagaatgatgccagctgcttccgagatgctccctgatggttccacagattttttttttctttctttcagagagagagtcttaaactctgtcacccaggctggagtgcagtagcactatctcaactcactgcagcccccgcctcctgactgaagtgatcctcccacctcagcctcttgagcagctgagactacaggagaccaccaccacacccagctaattataattattattggccaggggaggtggctaacgcctgtaatcccagcacttggggaggctgaggcgggtggatcatctgaggtcaggagtttgagaccagcctggccaagatggtgaaaccccgtctctactaaaaatacaaaaattagccgggtgtggtgtcaggtgcctgtaatcccagctactggggaggctgaggcaggagaatcgcttgaacctgggaggcagagattgcagtaagccgtgattgcgtcattgcactccagcctgggggactagaatgagactgtctcaaaaatgataataataataatataaaataataaaaataatgtaaaatataaataaaaatataatttaaaatattatttatattatttttagagacagaatctcaccatgttgcctaggctggtcttgagctcctgagctcaagcaatctgcctacctcggcctcccagagtgctgggattataggcgtgagctaccacacccagctgtgattttttttttctttcaccagaataaaacccttatatcccagggataccaccaggagtatagcatgtcaaactcacatcccacctattctccctggggcctctcgaggaggaactatgtagtggtgtggtcagtgcacagaccatccgactgcatggattcaaaaccttgagcccctgtttatgacctgggcaagttacatgactactcagctttgatcccctatcggtaaagtggagattgataagttcccagttagaatagtattcataaagcattgtctgatatgtactaagttccaggtcatctttttttgagatggagtctcactttatcacccaggctggagtgcaatggcacgatctaggctcactgcaacctccgcctcccgggttcaagcgattctcctgcctcagcctcctgagtagctggcattacaggggcccaccaccacacctggttaatttttgtatttttagtagagatggggttttaccatgtgggtcaggctggtcttgaactcctgacctcatgatacgcccgcctcagcctcccaaagtgttgggattacaggcgtgagccaccatgcctggcccccaggttatctttaacagaaaaaatattcgggaagtgtttcttgtttcttcatttacatacacattgattcttgaagctgcatcagttctttaaaaaaaaaaaaaagaactaaaatttcttgcatattgtcatgtaaagtgtttttttgtttgtttgtttgagatggggtctcgctctgtcgcccaggctggagtgcagtggtgcgatcttggctcactgcaagctccacctcccaggttaatgccactctaccgcctcagcctcccaggtggctgggactacaggcacctgccaccatgcctggctaatttttttgtatttttagtacagactgggtttcaccatgttagccaggatctcctgaccttgtgatccgcccacctcggcctcccaaaatgctgggattacaggcatgagccaccgcacccggccaggagtgtgtatttttaaaagtatttccttgacttgtaaccataatgtaatttgggtatgacagtcatttcattcaatgaaggacaccttcaacattgtaaaacaccctcttgttaagtgactgatacaacatggatataacttattaaatacttactaagttccagggctgttcaaagcagatgagagggcaacgagagggaggggagggagtgacttggatcctgagtctcctgtacacctctttgtagtctttaaacatatgaccaagtctctttcagtcccatttggagaaggcagacaggctctaggcccatcctggaagcttatggctttcaagaaaatagttggcaccaatttcccaccctgggatgctcctgtgtccatcacacatgagttgctcccaagtcctcgggctgataggaaggcctgtcttaccaagggaggattcttactggagcagatgctgaaaaatccacctttcagggtaaaggcacaggatctgcctgtgccacacacaatgtcattgtccttgtttctgaacctcctgaagccttcttttttgaaatgcagtctcactctgtcacccaggcttgagggcaatggcacaatctcggctcattgcaacctctgcctcctgggttcaagcgatcctcccacctcagtctcctgagtagctggaattacaggcacatgccaccacacccagctaattttttttttattatttttagtagagacagggtttcaccatgttggccaggctggttttgaactcctgaccccaagtgacccacctgccttggcctcccaaagagctgggattatagacatgagacactgtaccgggcccccttgaaggcttttatccctgggacctaaagaaacaaaaagacagtagagaatgggtaatcagagcaaccacgtggtggaaaagaggctacggcctatctagatggaaaagcagacttgaaggaaagggagcatgtcttgaggttaaacagaagacatggagatgcaggagggatccagtgaggtcattttagggttagcacctgacagaagaggaaacaactcaagctccaggctccacaggatgtgtcgctgtccgctcagcaggtgctggaggaggggacagaggcgcctgcagaggtgctttctcctactggaatgaccacttttttttttttttttttttttttttttttttttaaaagacagtctcattctgtcacccaggtctggagtgcagtggcatgatctcagctcactgcaacctctgcctcccgggttcaagtaattctcatgccacagcctctaaaatagcatgggattagaggtgctcaccacaccacacctggctaatttttgtatttttagtagagatggggtttcaccatgttggccaggttgttcttgaaatcctgacctcaggtgatctgcccgcttggcctcccaatgtgctgggattacaggcgtgagccaccgcgcccggccatgaccagtctcagccctcactcagccccgaatctgcccagccagcatgctgcaggacacacactgctcctctagaatagtctgggctctaaggcgtgtgggcagcacccaggcaggggaagtcgactgctactggcagctccagaagtaaatttcctgggaaacactaagagtggagtctctcctgctgaaagcctcctcttaatgaggctggaccaaagcaaagtcgaaactcatcctatgatgtgtcatgaggtcagagcagaggcagaactgctgcctccagaccccacagtaccagcgggcagccctgccccagtcctggccatctgaccagtgccccagagaatagaggtggcctttcctgaaggctactgacctctgctgcccttatggattctgtgttcacatcacctcagggtctccctttccactgctgtagaacagaactaacaacaataattactactattgctgctacttcaaagagccatagagaagattaaaagaaccaatgtctgcgagccaattggcatattggtgactatgtattataatatacactactaaggaacagcttagctggttagttcttcattatcctaaaacacttgttgcatatgtacctagtggtagggaagaaaactgcagagacatggtcctctcccgtggtgtctaccgtgttggtcatgcgggcatgatggacattggccattgagccattcatataaatgggacattgcagctcttgatcagtgctacaacagaagaggtattttgggccatgaagctcataatagggagattgttccagttagggaattctgcaaaggcttccttgaggaagcaggatgagccctaaaggaaacataggtatggactggatgaactgggcagagggggtagaggaatgacattccagggagaaggcactgcacatggtgtggccaagggggagaacccagcttcaggtgagacaacatggggagagctgagattcaggggccaaattcctgtttgtcagaataagccatgaagcagccaaggactcaagtgtgggagatctggggcccaatctagatcaggggataagaacagaaaagaaatctgaggcacagatcatgtaggggatgttaatggacagaactagtttgttctgagtctctgtcatatgctcagccctttgctagactctttagatacattactccattttctttcacctggttcttaaaacaaatttataaggtaggtggatttatcgccactgtaatgatggcggaaatgaagacccagaggggtaatcataactatgccaggtaccagtgattaacaaaagaaaaggagtcaggcaaaatccctgtcttcccagaaactatattccagttgggggaagagagaccaaaaagcagatcaatacacctttgttctggttgttgtgtctgctcttcttaagtgacagcatcaagacttcaaccctggggactctgtgcagctgatgctctcaatacccctcacacctccccttggcattcgggtcccctgcgctccaggggcacctcttgtgggcacctgcccctctctgcctgagagctaactcttgtcaccagagcatgcttgagttttgcacagaaactgcgtggggtgcagggagataactcacctcccctgagagcagcccttagccataacatggcttcctcctccctcagaagagacagctctaagatgtgtcccccagggtctctcagaggtccccagcaggactgagtcccactgcccacacaggaaccaacttactaacataccctgcattggattcttcccctttttggtctcatttcttcactcccctgctactgcttcctgggatcatctcctaaattccagatactggtattcaaatccttatctcagcaccgtctctcagggtgcccaacatatgacagctaatcctgcattgccttccagggaaacaagcaaccctagttcctagcccccaagaagtcctcccataggactctgtcagatgctcagagatgacgaggctgggttgcacaaccctcaataacatcctcttttgaattacagatggccaatgacagcacagagaccagtgaagcaggggaagaggaggaggaccacgagggagacagcgagaacaaggagcggatgccctttatccagtaactgaggacccaggtgggagaatgtgaaggatggtttggaagatgaggacccggctgagaaaactcttctgtgccccagtgaacaaatgctgtagtccagtgcgtgtcgtgtttgtctgcagtcagctgagctaaaaagctgttgatcactgttgttttttgaagtgccaatcccatgccatgcagtattatgtccctctcctatctgtgtattacacattcccctctcccctgtatcaaaaccatccatctgtgggttcttcttgacagttctagaacagccttgcaaattaatacaagtcccaggcccaatgcctaagagaccagacgtgggcaaagacaagtttggatggaaaggtgttatcacagagccctgtccagctcctagaattcctcaggccagtgacacttttttgctgctggccacccatgcctctgatgagaacacttgccaatttggccagcagaaagagagtaggccggatgttttcatgagcccacaaatttagaaactctcctagtagtactttttctctctccatttaagagacaactacggtcaaaagtttgagccattctcttctaccccttcagtgtctgaccctttcactggctcttatctgtaaacacagggaggcaggtatggatttttcacagtagacaatgggtcaacagcatgagtttgaggacctgctgtgaagatttctcctccaaaatacatctcatgggcaggattcttcctgctccatatctgtttcaattttaagaaagcaccacatacaagacacattcagaagtcattcctgagcattgctggtgtttgcacacttgccacctgcattaccaattctgtaaatttcaattcctggtggaaagtgaccactttgaccatggatttcccaaagaagagttcctttgcagaccataggtggaaaagtcaatgagcatctccttccttgccaaagcatgtcccaacatgtaacaaactctagggatacaaaaggtttatattcagcatctgatgtcagatgtacagttcctcccctcccatatataaaccccggtgtagaatctgcagcgccctgctcttcggaaaccaaggaacaagccacctgctcacacaccttgttcaacttttcagctcctaaggaaccccacccccatgcaatttgactgtgcttgagaggtgaatacagttaccttcgagaaacagagggagctcctcaccccgtccttccagtccttttggctaaaatgcttaactatcactcacaaacaaatgtggagataccaggagctcatttgattcataccccaactttgtgttctgaaaaacatcagagggattttacattgcccagtttctccaccaacaagccttagggtggacccaaccctttccgcaagtggtaggaacgaatgcatcttagcaattacctgatttccaaagtccttttgtagcaaatgtcacctcattcgtggtctttttacctatcctaagcttatgatgatgagttatgtatgccaaatacttatctgaagagtttctcctcattgtgaatgtgtatgtaaaatatgaagacaagaaagggtgctttcatctgaggaaccaaggggtgagagtatcccaaaggaggacaccagcatcatcttttcttcgtactccaggacccaccaatattccagttctgggtcatttagagagataatggggcgtttattcccctattacctttgctaagtgctatattattggctgtttctcccgtaaccatgctgaaaagggggtcttagggagaactgtcatccaagtggcattcctagtaagttgggtagaaatgacattttccagagctgaaggagtgaagagcccttggccatactagggctctccttcccccggggagtgggaactcagccacattcagaattcacatcgcctttgttatgtccagaggagaggcataaaaaggcactctcccccaccacccctaccaaatctgggtttggtttggttttatttaactagcaaagttaatccagtaatcgcaaattactccagatggttaaagaaaaccctttcagaatacagaacgagaaaactagagtttgaccaataagaccaatttctgccatgaagaaccgggggacgcaagttaattgtttaacgtactctcattttaagcaccttctttcctgtctcttgattgttttttctgaaggaagtgtaaagaatgtctcagtctgccttaaaggaactgtgaaggcttctctgtaatttaagcttgatagaagtgaactgaaacattgtctaatgtctttgtggctttagagcttttgttatattgtgcctataaagcaaattatgtttacataaaaatataaataaagtattcagcatagcaaaacctca

SEQ ID NO: 869 - DNA, 302 bp, Homo sapiens
gcgcagtggttcatgcctgtaatcccagcactttgggaggccgaggtgggtggatcacgaggtcaggagattgagaccatcctggctaacatggtgaaaccccgtctctattaaaaatacaaaaaattagctgggtgtggtggcgggcgcctgtagtcccagctattcgggaggctgaggcaggagaatggcgtgaacccgggaggcagagcttgcagtgatccgagatcgtaccactgcattccagcctgggtgacagagcgagattctgtctctcaaaaaaaaaaaaaaaaagaaaaaaa

SEQ ID NO: 870 - DNA, 302 bp, Homo sapiens
gcgcagtggttcatgcctgtaatcccagcactttgggaggccgaggtgggtggatcacgaggtcaggagattgagaccatcctggctaacatggtgaaaccccgtctgtattaaaaatacaaaaaattagctgggtgtggtggcgggcgcctgtagtcccagctattcgggaggctgaggcaggagaatggcgtgaacccgggaggcagagcttgcagtgatccgagatcgtgccactgcattccagcctgggtgacagagcgagattctgtctctcaaaaaaaaaaaaaaaaagaaaaaaa

SEQ ID NO: 871 - DNA, 486 bp, Homo sapiens
cagactttaagatcatacattaaagcatgagggaaaaatatgtaaacaaataagtaaggaaagcctgttctggagtgagtgcacaatttcttactgttggggacatgtaatcagcaaatttgggagacctctggtttaaagatgtaaccttgcaaattgagtttttagcttttttgcatgctgggcaaagaacaacaatttgagatgttgaaatgtatagtattttgttattgtagaaattgaggaaaaatagggacttctacccattataaactgaaccctgtaagtatgatcacttcctcctttctacttactcttcttagcactcccatacccaaactgagaatgagtgaaaggaaaatgaaagttaagagcactagatgatcttccattttccttactggaacatgcatgattgcatggcagggggagatacatactcctgtaccagtccttccaaaaataaagaactaaataaatgtgttc

SEQ ID NO: 872 - DNA, 330 bp, Homo sapiens
atcttaaattgttaatgcatgtgtttatcattttcttctataattctactttgttctttagtgatttaatattctatcatttgaagacaaacctagtaagaaaacaatttagtagaaaaataattacatatatttatatagtgataaattcctttgctttgagatttgttcatcgctttataatttaaaaaacaaaaataaaatgtatttcctctttcctataatggtatagcaacattaccattttatagttcataaattatgtttgtgtgttacatggaaaaatctttgttaaattttattgtattaactttcctagcagcttttgtt

SEQ ID NO: 873 - DNA, 642 bp, Homo sapiens
actaaaaatgcacaacttagccaggcgtggtggtgggcgcctgtaatcccaactactcgggaggctgggttaggagaattgcttgaacccaggaggtggaggttgcagcaagccgagattgcgccactgcactccaggctgggcaacaagagcaagactctgtctcaaaaacaacaacaacaacagacctctggggcagcaaatcagaaaacacaaaataaaactggaaaagctcagtcttgctttcctccaagtgcccattgactcacagctggctctttaggatttataaccaaagagtcaaggaccagcttgtacagagtaaagtattgttgttttgcagagggagctaagaaacagctccttgattcattggatctacaattaattattgagtgatgctctgtgttctgcactatcctaggctctatgatgtacagatgagacatagatagagatatataaaaacatcacatttccatctctgccgtccaaaaacttataatctatttgggaacatatacagagttgagagttcatgacagtatccggaaaaatgtcctaagagtgatagagataataaatttgcagtgtatagaagtcctggggccgggcacagtggctcacacctgtaattctagc

SEQ ID NO: 874 - DNA, 642 bp, Homo sapiens; identical to SEQ ID NO: 873

SEQ ID NO: 875 - DNA, 242 bp, Homo sapiens
gacagtgcagtggttcaccatcagaggaaatgtgataggaggtgtaggttctagacttgggcatattgtctctgtggtatctgaaggacaacaaacttagatggtcatgaagctcaggagaacttcatttaaacagcatcattgactgggcacagtggctcatgcttgcaatcccagcattttgagaggccgggttaggcagatcacctgagctcaggagtttgagaccagcctgggcaaca

SEQ ID NO: 876 - DNA, 242 bp, Homo sapiens; identical to SEQ ID NO: 875

SEQ ID NO: 877 - DNA, 377 bp, Homo sapiens
atgagttaagacatgttaagttctcaaacacatgctctgaagggaaccacgtaggaggcactcaataaatcgcagctgtcattgtcgttgtattgtccttgttattaacctgcctggaagtcagcagttgttcttcattgacttaaccatctgacaccccagaagagatagagatatcaccctaataatgagaggaagtggtaataaagagcatatttgtgaaagcggaatgaaatctgggattaactgaagaaacgccgcagatttattcaacctatgttgtctattccctactgaataatatttatataccttaccctagatgtcaaagcagtcccctgatctcatcccaaaagacaattcttgccttggttttg

SEQ ID NO: 878 - DNA, 591 bp, Homo sapiens
cccattaagcgagccatcactgaacattttccttgattgatgctttaagcttctgtcactcactctttgaaaatatcagactacagggtctgaagcaggtttctgcaatattctgcagtacctcatgggtacaaaagagacacaggaatatgccacagcatctagatccaattcttagtgaaaattttgttctttcatctgtattctggtcagccagcttgaagtagacacaggcagatgcttggagagtcgaaattatagccgaatgatatcacagagtagttaaataccagccaagctgtggttgcagcatggcaactttacaagccgggcaggttagcatggatgctgtgaaaagtgacccctctatctgaaaaagggttttgtaccttggctggcattagtcacttttccttgtttgatatttacagctttctcttgtcctttgtatcctttgggtaacacaccgtgagtgagagcagaaaagctttccttataaaggtagcaattttattcaagattaaaatgctctatttttccacattacatcaatgagtaccttcaaaaaaagatgacttaatgagggggaaa

SEQ ID NO: 879 - DNA, 591 bp, Homo sapiens
cccattaagcgagccatcactgaacattttccttgattgatgctttaagattctgtcactcactctttgaaaatatcagactacagggtctgaagcaggtttctgcaatattctgcagtacctcatgggtacaaaagagacacaggaatatgccacagcatctagatccaattcttagtgaaaattttgttctttcatctgtattctggtcagccagcttgaagtagacacaggcagatgcttggagagtcgaaattatagccgaatgatatcacagagtagttaaataccagccaagctgtggttgcagcatggcaactttacaagccgggcaggttagcatggatgctgtgaaaagtgacccctctatctgaaaaagggttttgtaccttggctggcattagtcacttttccttgtttgatatttacagctttctcttgtcctttgtatcctttgggtaacacaccgtgagtgagagcagaaaagctttccttataaaggtagcaattttattcaagattaaaatgctctatttttccacattacatcaatgagtaccttcaaaaaaagatgacttaatgagggggaaa

SEQ ID NO: 880 - DNA, 519 bp, Homo sapiens
gtgatattctttgagcagtgtgacctgttagaggtgcccagtcaggtccgatgaaaagccctctgatttgttgaaatagtgcattagtaaagtattatagtttattttcacaaagctagattagttgttacatgttggtttttgttttgcctagccctaacaagtatggaggtgaccttgatgtgtctatagaatatcaggaatatctggctgggtgggtggctcacacctgtaatcccaacaatttgggaggccgaggtgggcggatcacctgaggtcaggagtttgagagaggcctggccaacatggtgaacccccgtctctactaaaaatacaaaaattagccaggtgtggtggcaggtgcctgcaatctcagctactccggaggctgatgcaggggaatcacttgaacccgggaggtagaggttgcagtgagccaagattgtgccactgcactccagcctgggcaacagagcgagattctgcctcaaaaaaaaaaaaaaaaaaaaaaaaaaaaaa

SEQ ID NO: 881 - DNA, 505 bp, Homo sapiens
gtgatattctttgagcagtgtgacctgttagaggtgcccagtcaggtccgatgaaaagccctctgatttgttgaaatagtgcattagtaaagtattatagtttattttcacaaagctagattagttgttacatgttggtttttgttttgcctagccctaacaagtatggaggtgaccttgatgtgtctatagaatatcaggaatatctggctgggtgggtggctcacacctgtaatcccaacaatttgggaggccgaggtgggcggatcacctgaggtcaggagtttgagagaggcctggccaacatggtgaacccccgtctctactaaaaatacaaaaattagccaggtgtggtggcaggtgcctgcaatctcagctactccggaggctgatgcaggggaatcacttgaacccgggaggtagaggttgcagtgagccaagattgtgccactgcactccagcctgggcaacagagcgagattctgcctcaaaaaaaaaaaaaaaa

SEQ ID NO: 882 - DNA, 253 bp, Homo sapiens
aggcacccaccatgcccggctaattttttgtatttttagtagagatggggttttgccatgttggctaggctggtctcaaactcctgacctcaggtgatccacccacctcggcctcccaaagtgttgggattacaggcttgagccactatgcctggcctctgctgacttttaaaaaaataacagggaatgtggggtcactcatagtgtggagggaaattttgagaattttaagcacctctgaatcatattggca

SEQ ID NO: 883 - DNA, 511 bp, Homo sapiens
aaaaatcaaaagaaaaacagccgtcataatacatattatttgatgaggtctgccgtattaggcactttatctacaatattatgtttagctcttgtgacaactatgcaagataggtattacttttaaaattttatagacaatgaaacaatctcaaatgtacacgaatactttttgtaaagagattttcacccacattgatttaccaagaaagtaagtaaaccaaagccccctattctttatctttttagttgggccgcattgtccatctaggcattgcataaacttgttagagagaagtcctccaaaaatcattttggtaattttggggaagacacacagctgtcctgatttttagaagtgctatttggatccatgttaatttgtctcatcatagtggaaactgagactagccattcactactagtcaatcaatattccatgtatttgtatacagtcactttagatagtaatttcacatatctaattccccaccagtgccttaactgcgctt

SEQ ID NO: 884 - DNA, 511 bp, Homo sapiens; identical to SEQ ID NO: 883

SEQ ID NO: 885 - DNA, 253 bp, Homo sapiens; identical to SEQ ID NO: 882

SEQ ID NO: 886 - DNA, 306 bp, Homo sapiens
aaagagtccatattagcttccaaccccaatttgtactgtccacttaaagcaatacgttaagaaagatttcaaggcttcatgctggttcactgagaaagagctctggtccatcatgtattccacagacaagggaagggaataatggcatgcattcctgacatttccttttcctggtctagcaccatcctaaatctttaagagagaagagagacctctcatgtggccctcccttgagcatacactggcctgttggatctggctgtgagttatattcagagacctgccagggacaatggatgtgataag

SEQ ID NO: 887 - DNA, 970 bp, Homo sapiens
ctactgcataaacagaatgtagaattaaagaactcttggaccaagaacagacacaagggcgatggattttaatactattgttttctagttgaggaaacaaaggcaacttaaccaataaattctctttaatttcaaggggaaagagaaccactatttattcactgtagttactgtagattgttttatagattaggaaactgtagagagtttaagtattgtgtttaacatcatgcagctaagttagtgccacagtcagaatttgaatccaactttatctggggcctaagcctgtgtgccctttgcactggatcgtattgctcttttttattagcattttttccatcctttctcctccctgtcccactgacttgctgtatgtatatcttactctactgaaatctgatctcttctactttggatcttagtaagattctgataaactaattgataatttatattaatagttgataaaactcaatgccttatggcctttattgtgtacctactttgggatagtctctaaggatataaaagagatatcacccctgccctgaaaaattccagagtagcactgtgctgccgtctatctaatcaacccatcacatttttgtaaacaaatttgtgataaaattattactatatttttcgcctttcccacgatggaggcaaaacagtgggtgattctttgggctatttcaaatctactttttctataacactatatttctttcccttctgtgtccttttttaaattaaatattaaaaatgttagccaggcatagtaggtgcacccgtaattccagctactcaagaggctgacacaggaggatcacttgagcctgagttccaggctgcagtgtgctatgatcgtgcctatgattagctactgcactccagcatggctaacatagtgagacctcatctttaaacaaacaaacaaaaacaaaaaaaaaaaaaaaaaaagaaaggg

SEQ ID NO: 888 - DNA, 4717 bp, Homo sapiens
gtcctgccgcttggccgcggggcgcctggctcagtggcttctgcgggcttcgaggagcgggatgttgcgggctgggtggctccggggcgcggcggcgctggcgctgctgctggcggcccgagtggtggcggcgttcgagcccatcaccgtgggcctagccatcggggccgcgtcggccatcaccggctacctgtcctacaatgacatctactgccgcttcgccgagtgctgccgcgaggagcggccgctcaacgcttcgggtacggcgcgcgcgcgagctgtgggtcggcgctgcggggggcgcgggggcgcgggggcgcggagggacggcctcgtgggcgcctggcacggaccgggcccgtggcatctagacggcggtggtcccagctggggtgggcggggagcggatggggcggccccggaaccgttcgcgggaacgcagaagcggtgccttcgcaaacagtctccagatcgtggggctgccccagcgcctttctaaagctcccgttccttgggatcacaggtggaagaaacggaaagtaggcgggcggcccttctgcgccctgccaaccctattaagtagttttcagacgtgctgcgtcgcccagaaagcccacatttggcccctggttttcctgcaggtcagcaagggtggctgggattagcaagcgctcagtcaagcgatggttcatctctgaatgaatgaacatttagcttccttatcagaccccgaagcgttaaggacctccacataatcttgaaagtggcatcgtttgactgcctcggccctagggtgtggcagacaccctgctgtgtccctggataatctgtgcttcttgctttggccagctaagaaagtgctgcgttgctgatgcatttttaaggtctgtttctctctttgttctggggctgttcttgcagctctcaagctggatttggaggagaagctgtttggacagcatctagccacggaagtgattttcaaggcgctgactggcttcaggaacaacaaaaatcccaagaaaccactgaccctttccttacacggctgggctggcacaggcaagaattttgtcagtcaaattgtggctgaaaatcttcacccaaaaggtctgaagagtaactttgtccacctgtttgtatcgactctgcacttccctcatgagcagaagataaaactgtaccaggcaagagaacccgctattatctcgtctgcaggccagtcggactggtccgggtgacctgctcactaactctggcctctgcttctctttcctttgtgttgctgtagcccccggctccactgagttaaggcacacttagtccaggtagttacaaagctctcctacaacatttctcttacttggttccaaaacagtccagtggggtaggggatgttatttccattaaaagatggggagccaagggcctggcgccgtggctcacgcctgtaatcccagcattttggggaagccgaggcgggcggatcatttgaggccaggagtttgagaccagcctggccaacatggtgaaaccccatctctacctaaaagtaccaaaattacctgagcacggtggcacgcacctgtaatcccagctacttgggaggctgaggcaggagaatcgcttgaacctgggtggcagaggttgcagtgagctgagatcgcgccaccgtactcggtctcaaaaaaaaaaaaaaaaaaaaggcctggcacagtggctcacgcctgtaatcccagcactttcggaggccgaggggggcggatcacgaggtcaggagatggagaccatcctggctaacacggtgagaccccgtctctactaaaaatacaaaaaattagccggggatggtggcgggcacctgttgtcccagctactcgggaggctgaggcaggagaatggcctgaacccgggaggcggagcttgcactgagccgagatcgcgccactgcactccagcctgggcgacacagtgagactctgtctcagaaaaaaaaaaaaaaaagagagatgtagtcagggccaggtgcagtggctcacgcctgtaatcccagcactttgggatccgccaaggcgggcggatcacctgaggtcgggagttcgagaccagcctgaccaacatggagaaaccccgtctctactgaaaatacaaaattagccgggcgtgatggcgtgcgcctgtaattcaagctacttgggaggctgaggttgcagtcagctgagaatgggccactgcaccccagcctgggcaacagaatgagactctgtctcaaaaaaaaagaaaaaaaaaaaagatggagcctggagcccagaggcaaggtgacttactcctacaatctttgtagcagaacaggacctttgtagcagaaccaaaacctcccaactcccagttgacatggtagccaccttctctggtgagtgaagggattccacatccccagcagtgcagttggtgagaaggggcagtcagtcttcaaggatttgctccggtgtggcttcattcaatgctgcccacctctggtgcagcctcagctttgcctctgctctttgcaatgtagcctagaggtcttttttctccttaacaggttttattccctttgttcctcccatccttcatgtccttggcattgctttcttcaaaggaagcctcaaagaactgaaccttgagactgtttctccttttgagatattgtttccacattcattttatattaagttgtctaggagggttagttctcatttaaatgaatgttgtccttgtcaaggttaacattcccactggcaacatagcaagactccatctctacaaaaaataaaaaaattagccaggtgtagtggcatgcacctgtagtcccagctacttgggaggctgagatgggaggatcgcttgagcccgggaggctgagcctacaatgaaccatggtcatgtcactgcattccagtctgggcgacagagtaagactctatctcaaaaaaaaaaaaaaaaaattcctcctgttaggtggggactgaagaaagaaatagaaacttaactgaacaaggaagtagaagtgtttgcccaacaaactgacgtgagacagggaagactgctaaaaaggaaggaaggaaggattttcttgttctttacattcttcataaatctccggaaacagagtaatataaatggttgagggcatgtctgggggagtttcctggtatagcctttcacgctttggggttgagggcttgttgcttgagtgtctttatgtttgtttgaagaaaacatctggaacagatgcttttcatgaaatgtcattgagtcagctctgttggtctggggcactgtgtactgtgcaggtcttgatctagttccttattcctcagtatgtctgatagtactaacttgagattgtagtccaagagagatgaaaactatggctacgttagcagtgaatgatattcacggatcttgccgggtggctcattcctgtaatctcagcactttgggagggtgaggtgggtggatcacctgaggtcaggagtttgagacgagcctggccaacatggcacaaccctgtctctactaaaaatacaaaaattagccaggcatggtgcaggggatcggggcgcctgtagtcccaactacacggggggctgaggccggggaatcgcttgaacccaagaggcagaggttgcagtgagctgagatcacgccactacacaccagcctgggggatagagtgagaccctgtttccaaagacaaaaaagagaagaaaagaatcacggatcttgtacctcttatacctttaaaaagtcagatttaatagtcatttgagttaggaaaaaacttctctgcattttagcatctatctctgccaatttccactttttagagataaggttttagaaaagctgctacctagcgagtgggggtgagggtgccattctaagagctctgacctcgtccttcagtgcatgaggagcagatggagcctgcgcgcctcttggtgcaccctttgagcttcgcatcctgtttcttctttcatggttggtccaggaccagttacagaagtggatccgcggtaatgtgagtgcatgtgcgaactctgttttcatatttgacgagatggataaattgcaccctgggatcattgacgcaatcaagccgtttctagactactacgagcaggttgacggagtgtcttaccgcaaagccatcttcatctttctcaggtcagcgggaggcggttttttggggcacacaagcccttcattctctcaatgataaaatgaggtcctgaggaccatcagcactttgtttaccaggacgaaagtgcctgcttggcacaaggcacttacctactgctttacttttcctttgccagtctcagcatggcacacagtgtgggttgtggaaatgaactaaagaaataatcactgggccaggcgcggtggctcacacctgtaatcccagcactttgggaggccatggcgggcggatcaccaggagatcgagaccatcctggctaacatggtgaaaccctgtctctactaaaaatacaaaaattagccgggcgtggtggcgggcgcctgtagtcccatctactcgggagactgaggcaagagaatggcgtgaacccgggaggcggagcttgcagtgagccgggatcacaccactgcactccagcctgggtgacagagtgagactctgtctcaaaaaaaaaaaaaaaagaaataa

SEQ ID NO: 889 - DNA, 4717 bp, Homo sapiens
gtcctgccgcttggccgcggggcgcctggctcagtggcttctgcgggcttcgaggagcgggatgttgcgggctgggtggctccggggcgcggcggcgctggcgctgctgctggcggcccgagtggtggcggcgttcgagcccatcaccgtgggcctagccatcggggccgcgtcggccatcaccggctacctgtcctacaatgacatctactgccgcttcgccgagtgctgccgcgaggagcggccgctcaacgcttcgggtacggcgcgcgcgcgagctgtgggtcggcgctgcggggggcgcgggggcgcgggggcgcggagggacggcctcgtgggcgcctggcacggaccgggcccgtggcatctagacggcggtggtcccagctggggtgggcggggagcggatggggcggccccggaaccgttcgcgggaacgcagaagcggtgccttcgcaaacagtctccagatcgtggggctgccccagcgcctttctaaagctcccgttccttgggatcacaggtggaagaaacggaaagtaggcgggcggcccttctgcgccctgccaaccctattaagtagttttcagacgtgctgcgtcgcccagaaagcccacatttggcccctggttttcctgcaggtcagcaagggtggctgggattagcaagcgctcagtcaagcgatggttcatctctgaatgaatgaacatttagcttccttatcagaccccgaagcgttaaggacctccacataatcttgaaagtggcatcgtttgactgcctcggccctagggtgtggcagacaccctgctgtgtccctggataatctgtgcttcttgctttggccagctaagaaagtgctgcgttgctgatgcatttttaaggtctgtttctctctttgttctggggctgttcttgcagctctcaagctggatttggaggagaagctgtttggacagcatctagccacggaagtgattttcaaggcgctgactggcttcaggaacaacaaaaatcccaagaaaccactgaccctttccttacacggctgggctggcacaggcaagaattttgtcagtcaaattgtggctgaaaatcttcacccaaaaggtctgaagagtaactttgtccacctgtttgtatcgactctgcacttccctcatgagcagaagataaaactgtaccaggcaagagaacccgctattatctcgtctgcaggccagtcggactggtccgggtgacctgctcactaactctggcctctgcttctctttcctttgtgttgctgtagcccccggctccactgagttaaggcacacttagtccaggtagttacaaagctctcctacaacatttctcttacttggttccaaaacagtccagtggggtaggggatgttatttccattaaaagatggggagccaagggcctggcgccgtggctcacgcctgtaatcccagcattttggggaagccgaggcgggcggatcatttgaggccaggagtttgagaccagcctggccaacatggtgaaaccccatctctacctaaaagtaccaaaattacctgagcacggtggcacgcacctgtaatcccagctacttgggaggctgaggcaggagaatcgcttgaacctgggtggcagaggttgcagtgagctgagatcgcgccaccgtactcggtctcaaaaaaaaaaaaaaaaaaaaggcctggcacagtggctcacgcctgtaatcccagcactttcggaggccgaggggggcggatcacgaggtcaggagatggagaccatcctggctaacacggtgagaccccgtctctactaaaaatacaaaaaattagccggggatggtggcgggcacctgttgtcccagctactcgggaggctgaggcaggagaatggcctgaacccgggaggcggagcttgcactgagccgagatcgcgccactgcactccagcctgggcgacacagtgagactctgtctcagaaaaaaaaaaaaaaaagagagatgtagtcagggccaggtgcagtggctcacgcctgtaatcccagcactttgggatccgccaaggcgggcggatcacctgaggtcgggagttcgagaccagcctgaccaacatggagaaaccccgtctctactgaaaatacaaaattagccgggcgtgatggcgtgcgcctgtaattcaagctacttgggaggctgaggttgcagtcagctgagaatgggccactgcaccccagcctgggcaacagaatgagactctgtctcaaaaaaaaagaaaaaaaaaaaagatggagcctggagcccagaggcaaggtgacttactcctacaatctttgtagcagaacaggacctttgtagcagaaccaaaacctcccaactcccagttgacatggtagccaccttctctggtgagtgaagggattccacatccccagcagtgcagttggtgagaaggggcagtcagtcttcaaggatttgctccggtgtggcttcattcaatgctgcccacctctggtgcagcctcagctttgcctctgctctttgcaatgtagcctagaggtcttttttctccttaacaggttttattccctttgttcctcccatccttcatgtccttggcattgctttcttcaaaggaagcctcaaagaactgaaccttgagactgtttctccttttgagatattgtttccacattcattttatattaagttgtctaggagggttagttctcatttaaatgaatgttgtccttgtcaaggttaacattcccactggcaacatagcaagactccatctctacaaaaaataaaaaaattagccaggtgtagtggcatgcacctgtagtcccagctacttgggaggctgagatgggaggatcgcttgagcccgggaggctgagcctacaatgaaccatggtcatgtcactgcattccagtctgggcgacagagtaagactctatctcaaaaaaaaaaaaaaaaaattcctcctgttaggtggggactgaagaaagaaatagaaacttaactgaacaaggaagtagaagtgtttgcccaacaaactgacgtgagacagggaagactgctaaaaaggaaggaaggaaggattttcttgttctttacattcttcataaatctccggaaacagagtaatataaatggttgagggcatgtctgggggagtttcctggtatagcctttcacgctttggggttgagggcttgttgcttgagtgtctttatgtttgtttgaagaaaacatctggaacagatgcttttcatgaaatgtcattgagtcagctctgttggtctggggcactgtgtactgtgcaggtcttgatctagttccttattcctcagtatgtctgatagtactaacttgagattgtagtccaagagagatgaaaactatggctacgttagcagtgaatgatattcacggatcttgccgggtggctcattcctgtaatctcagcactttgggagggtgaggtgggtggatcacctgaggtcaggagtttgagacgagcctggccaacatggcacaaccctgtctctactaaaaatacaaaaattagccaggcatggtgcaggggatcggggcgcctgtagtcccaactacacggggggctgaggccggggaatcgcttgaacccaagaggcagaggttgcagtgagctgagatcacgccactacacaccagcctgggggatagagtgagaccctgtttccaaagacaaaaaagagaagaaaagaatcacggatcttgtacctcttatacctttaaaaagtcagatttaatagtcatttgagttaggaaaaaacttctctgcattttagcatctatctctgccaatttccactttttagagataaggttttagaaaagctgctacctagcgagtgggggtgagggtgccattctaagagctctgacctcgtccttcagtgcatgaggagcagatggagcctgcgcgcctcttggtgcaccctttgagcttcgcatcctgtttcttctttcatggttggtccaggaccagttacagaagtggatccgcggtaatgtgagtgcatgtgcgaactctgttttcatatttgacgagatggataaattgcaccccgggatcattgacgcaatcaagccgtttctagactactacgagcaggttgacggagtgtcttaccgcaaagccatcttcatctttctcaggtcagcgggaggcggttttttggggcacacaagcccttcattctctcaatgataaaatgaggtcctgaggaccatcagcactttgtttaccaggacgaaagtgcctgcttggcacaaggcacttacctactgctttacttttcctttgccagtctcagcatggcacacagtgtgggttgtggaaatgaactaaagaaataatcactgggccaggcgcggtggctcacacctgtaatcccagcactttgggaggccatggcgggcggatcaccaggagatcgagaccatcctggctaacatggtgaaaccctgtctctactaaaaatacaaaaattagccgggcgtggtggcgggcgcctgtagtcccatctactcgggagactgaggcaagagaatggcgtgaacccgggaggcggagcttgcagtgagccgggatcacaccactgcactccagcctgggtgacagagtgagactctgtctcaaaaaaaaaaaaaaaagaaataa

SEQ ID NO: 890 - DNA, 8034 bp, Homo sapiens
  SITE (532): n equals a,t,g, or c
  SITE (781): n equals a,t,g, or c
  SITE (786): n equals a,t,g, or c
  SITE (1022): n equals a,t,g, or c
  SITE (1069): n equals a,t,g, or c
  SITE (1086): n equals a,t,g, or c
  SITE (1102): n equals a,t,g, or c
  SITE (1109): n equals a,t,g, or c
  SITE (1136): n equals a,t,g, or c
  SITE (1385): n equals a,t,g, or c
  SITE (1422): n equals a,t,g, or c
  SITE (1522): n equals a,t,g, or c
  SITE (1952): n equals a,t,g, or c
  SITE (2348): n equals a,t,g, or c
  SITE (2441): n equals a,t,g, or c
  SITE (2519): n equals a,t,g, or c
  SITE (2540): n equals a,t,g, or c
  SITE (2612): n equals a,t,g, or c
  SITE (2644): n equals a,t,g, or c
  SITE (2800): n equals a,t,g, or c
  SITE (2965): n equals a,t,g, or c
  SITE (3003): n equals a,t,g, or c
  SITE (3013): n equals a,t,g, or c
  SITE (3017): n equals a,t,g, or c
  SITE (3031): n equals a,t,g, or c
  SITE (3038): n equals a,t,g, or c
  SITE (3100): n equals a,t,g, or c
  SITE (3368): n equals a,t,g, or c
  SITE (3454): n equals a,t,g, or c
  SITE (3468): n equals a,t,g, or c
  SITE (3494): n equals a,t,g, or c
  SITE (3648): n equals a,t,g, or c
  SITE (3690): n equals a,t,g, or c
  SITE (3926): n equals a,t,g, or c
  SITE (3938): n equals a,t,g, or c
  SITE (4769): n equals a,t,g, or c
  SITE (4929): n equals a,t,g, or c
  SITE (5005): n equals a,t,g, or c
  SITE (5492): n equals a,t,g, or c
  SITE (5583): n equals a,t,g, or c
  SITE (5719): n equals a,t,g, or c
  SITE (5753): n equals a,t,g, or c
  SITE (5776): n equals a,t,g, or c
  SITE (5796): n equals a,t,g, or c
  SITE (5831): n equals a,t,g, or c
  SITE (5872): n equals a,t,g, or c
  SITE (6244): n equals a,t,g, or c
  SITE (6265): n equals a,t,g, or c
  SITE (6281): n equals a,t,g, or c
  SITE (6293): n equals a,t,g, or c
  SITE (6392): n equals a,t,g, or c
  SITE (6431): n equals a,t,g, or c
  SITE (6477): n equals a,t,g, or c
  SITE (6701): n equals a,t,g, or c
  SITE (6880): n equals a,t,g, or c
  SITE (6898): n equals a,t,g, or c
  SITE (6920): n equals a,t,g, or c
  SITE (6934): n equals a,t,g, or c
  SITE (6939): n equals a,t,g, or c
  SITE (6951): n equals a,t,g, or c
  SITE (6957): n equals a,t,g, or c
  SITE (6971): n equals a,t,g, or c
  SITE (6979): n equals a,t,g, or c
  SITE (6985): n equals a,t,g, or c
  SITE (6997): n equals a,t,g, or c
  SITE (6998): n equals a,t,g, or c
  SITE (7008): n equals a,t,g, or c
  SITE (7020): n equals a,t,g, or c
  SITE (7028): n equals a,t,g, or c
  SITE (7034): n equals a,t,g, or c
  SITE (7040): n equals a,t,g, or c
  SITE (7041): n equals a,t,g, or c
  SITE (7061): n equals a,t,g, or c
  SITE (7064): n equals a,t,g, or c
  SITE (7071): n equals a,t,g, or c
  SITE (7083): n equals a,t,g, or c
  SITE (7087): n equals a,t,g, or c
  SITE (7092): n equals a,t,g, or c
  SITE (7099): n equals a,t,g, or c
  SITE (7103): n equals a,t,g, or c
  SITE (7109): n equals a,t,g, or c
  SITE (7117): n equals a,t,g, or c
  SITE (7122): n equals a,t,g, or c
  SITE (7348): n equals a,t,g, or c
  SITE (7770): n equals a,t,g, or c
tggctgggattagcaagcgctcagtcaagcgatggttcatctctgaatgaatgaacatttagcttccttatcagaccccgaagcgttaaggacctccacataatcttgaaagtggcatcgtttgactgcctcggccctagggtgtggcagacaccctgctgtgtccctggataatctgtgcttcttgctttggccagctaagaaagtgctgcgttgctgatgcatttttaaggtctgtttctctctttgttctggggctgttcttgcagctctcaagctggatttggaggagaagctgtttggacagcatctagccacggaagtgattttcaaggcgctgactggcttcaggaacaacaaaaatcccaagaaaccactgaccctttccttacacggctgggctggcacaggcaagaattttgtcagtcaaattgtggctgaaaatcttcacccaaaaggtctgaagagtaactttgtccacctgtttgtatcgactctgcacttccctcatgagcagaagataaaactgtanccaggcaagagaacccgctattatctcgtctgcaggccagtcggactggtccgggtgacctgctcactaactctggcctctgcttctctttcctttgtgttgctgtagcccccggctccactgagttaaggcacacttagtccaggtagttacaaagctctcctacaacatttctcttacttggttccaaaacagtccagtggggtaggggatgttatttccattaaaagatggggagccaagggcctnggcgncgtggctcacgcctgtaatcccagcattttggggaaggcgaggcgggcggatcatttgaggccaggagtttgagaccagcctggccaacatggtgaaaccccatctctacctaaaagtaccaaaattacctgagcacggtggcacgcacctgtaatcccagctacttgggaggctgaggcaggagaatcgcttgaacctgggtggcagaggttgcagtgagctgagatcgcgccanccgtactcggtctcaaaaaaaaaaaaaaaaaaaaggcctggcacagngggtcacgcctgtaatncccagcactttcgganggccganggggggcggatcacgaggtcaggagantggagaccatcctggctaacacggtgagaccccgtctctactaaaaatacaaaaaattagccggggatggtggcgggcacctgttgtcccagctactcgggaggctgaggcaggagaatggcctgaacccgggaggcggagcttgcactgagccgagatcgcgccactgcactccagcctgggcgacacagtgagactctgtctcagaaaaaaaaaaaaaaaagagagatgtagtcagggccaggtgcnagttgtcacgcctgtaatcccagcactttgggtattnccaaggcgggcggatcacctgaggtcgggagttcgagaccagcctgaccaacatggagaaaccccgtctctactgaaaatacaaaattagccgggcgtgnatggcgtgcgcctgtaattcaagctacttgggaggctgaggttgcagtcagctgagaatgggccactgcaccccagcctgggcaacagaatgagactctgtctcaaaaaaaaagaaaaaaaaaaaagatggagcctggagcccagaggcaaggtgacttactcctacaatctttgtagcagaacaggacctttgtagcagaaccaaaacctcccaactcccagttgacatggtagccaccttctctggtgagtgaagggattccacatccccagcagtgcagttggtgagaaggggcagtcagtcttcaaggatttgctccggtgtggcttcattcaatgctgcccacctctggtgcagcctcagctttgcctctgctctttgcaatgtagcctagaggtcttttttctccttaacaggttttattcccntttgttcctcccatccttcatgtccttggcattgctttcttcaaaggaagcctcaaagaactgaaccttgagactgtttctccttttgagatattgtttccacattcattttatattaagttgtctaggagggttagttctcatttaaatgaatgttgtccttgtcaaggttaacattcccactggcaacatagcaagactccatctctacaaaaaataaaaaaattagccaggtgtagtggcatgcacctgtagtcccagctacttgggaggctgagatgggaggatcgcttgagcccgggaggctgagcctacaatgaaccatggtcatgtcactgcattccagtctgggcgacagagtaagactctatctcaaaaaaaaaaaaaaaaaattcnctcctgttaggtggggactgaagaaagaaatagaaacttaactgaacaaggaagtagaagtgtttgcccaacaaactgacgtgagacaggganagactgctaaaaaggaaggaaggaaggattttcttgttctttacattcttcataaatctccggaaacagagtaatatnaaatggttgagggcatgtctngggggagtttcctggtatagcctttcacgctttggggttgagggcttgttgcttgagtgtctttatgtttgntttgaagaaaacatctggaacagatgcttttncatgaaatgtcattgagtcagctctgttggtctggggcactgtgtactgtgcaggtcttgatctagttccttattcctcagtatgtctgatagtactaacttgagattgtagtccaagagagatgaaaactatggctacgttagcagtgaatgatnattcacggatcttgccgggtggctcattcctgtaatctcagcactttgggagggtgaggtgggtggatcacctgaggtcaggagtttgagacgagcctggccaacatggcacaaccctgtctctactaaaaatacaaaaattagccaggcatggtgcaggggatncggggcgcctgtagtcccaactacacggggggctgagngccggggaantcgncttgaacccaaganggcaganggttgcagtgagctgagatcacgccactacacaccagcctgggggatagagtgagaccctgntttccaaagacaaaaaagagaagaaaagaatcacggatcttgtacctcttatacctttaaaaagtcagatttaatagtcatttgagttaggaaaaaacttctctgcattttagcatctatctctgccaatttccactttttagagataaggttttagaaaagctgctacctagcgagtgggggtgagggtgccattctaagagctctgacctcgtccttcagtgcatgaggagcagatggagcctgcgcgcctcttggtgcacccttntgagcttcgcatcctgtttcttctttcatggttggttcaggaccagttacagaagtggatccgcggtaatgtgagtgcatgtgcgnaactctgttttcantatttgacgagatggataaattgcanccctgggatcattgacgcaatcaagccgtttctagactactacgagcaggttgacggagtgtcttaccgcaaaagccatcttcatctttctcaggtcagcgggaggcggttttttggggcacacaagcccttcattctctcaatgataaaatgnagtcctgaggtccatcagcactttgtttaccaggacgaaagngcctgcttggcacaaggcacttacctactgctttacttttcctttgccagtctcagcatggcacacagtgtgggttgtggaaatgaactaaagaaataatcactgggccaggcgcggtggctcacacctgtaatcccagcactttgggaggccatggcgggcgtatcaccaggagatcgagaccatcctggctaacatggtgaaaccctgtctctactaaaaatacaaaaattagnccgggggtggtngcgggcgcctgtagtcccatctactcgggagactgaggcaagagaatggcgtgaacccgggaggcggagcttgcagtgagccgggatcacaccactgcactccagcctgggtgacagagtgagactctgtctcaaaaaaaaaaaaaaaagaaataatcactgatagcaggcaattttagctgggcatcgtggcatgtgcctggagtcccagctcctggggaagtcgaggcaggaggattggttgagcccaggagttcaaggttttattgagctatgatcataccactgcactcctgcctgggtgacaatcaagaccccgaccctaaaaatgaaacagaaatgaaaacagttaattttattaactgtgcatgttggtttttagggttataaagggccatagcattatcccagctagttgtgaataaacactttaagttccatgagagcacacttttttgtctagtagcactcagtaaatattccttgatgaaaaatagatcttcggccgggtgtggtggctcacacctgtaatcctagcactttgggaggccaaggtgggcagatcacttgaggtcaggatttcaagaccaggctggccaacatggtgaaaccccgtgtctactaaaaatacaaaaattagaaggggcttcgttgcaggcgcctgtaatcccagctactcaggaggttgaggcagaagaatcacttgaacccggaaggtggaggttgcagtgagctgatattgcgccactgcactccagcctgcgtgacagagtgtctcaacaggaaaaatagacttagagcagattcatttcttggtaagacacagaagtnctttttttttttttttttttttttgagaccgagtttcatttttgttgcccaggctggagtgcaatggcatgatctcggctcgctgcaacctccacctcccggattcaaacgattctcccacctcagcctcccatgtagctgggattacaggcatgcaccnaccattagcctggctaatttttgtgtttttagtagagatggggttactctatgttggtcaggctggccttgaactncccgacctcaggtgatctacctgcctcggcctcccaaagtgctgggattacaggcatgagccaccacacccagcagacacagaagtcttaatatgtgattttaatctttatttctctggcaaactcagcaatgcaggcggggaccttataactaagacggctcttgacttttggcgggccggaagaaagagggaagacattcagctgaaggacctggaacctgtactgtctgtcggagtcttcaataataaacacagtgagtccaccagggtaaaggagccccttaactgtccagcagtgagccgtctgctctttcattgagtgtttcacaaagccacaggatcccactggatttcctcactttgctaaagtcaggaattttcttagggcatactgtgctagaaaccagtgagtgagtgtccagctgagtcctgcatgggcttgttgcacactgacaagagactctctcaaggggtacggacatganggaatgtgctgagggtcgggactggagcttggccaggtggcggtggtggcaggaaacccagctgtgtcttgttctgcaggtggcctgtggnacagtggactgatcgacaaaaacctcattgattactttatccccttcctgcctttggagtacagacatgtgaaaatgtgtgtgagggccgagatgagggcccgtggttctgccatagatgaagacattgtcacaangagtggcagaggaaatgacgtttttccccagagnacgagaaaatctactcagacaangggctgcaagactgtgcagntcgcggctggatttccactgagctcctatccagantggggtaggagacagctgggaggctccgcacgccagaggcncttgcctttcagaagaaccctgaagaccgctttggggttttgcctgtttgcaccttagacttttgggtatagaatcttttttttgagaagaggtctcactccgtcatccaagctggagtgcagtggtgcaatcctcaactcactgcaacctccgctcccggtttgagtgattctcatgcctcagcctcccgagtagctgggattacaggcatgagccactgtgcccagctgggatatagaatctaagagttgattgtggaaaacacgtgaatctattgcgcgcatttgtcatttagcaagatggcagcagtccagctgttctttgcagctggagatgaacttttaaaaatccccttcacacttaatgtactngaccgagacagaagtacctgnaaaacagctgtgcatnggcaggcccggncaatagcttctgacccacagcacccgcgcctcagaagctacggtcacaactaaaggagtccagggacttgctgcaggctggggggcactgggtggttcntcaccagcaggctgcggggcactgtgttctcattggccnaaaaacatccttttgctctgtctcgttctttacacagagttcactngacttgaagtatactcagttaaaatcggggctggaggtgcagacggtgtctgaccggaggatgtggccgtgcccgccgagcactcttgatctgagctgacctgtgtgtgtgtgtgggggggggtggggccttcacctaagacctctgcagcagacctggacagacaggcccctcccgcctgtccatcgctctagctgctaatacagccctggctgtggaatccnttcaccgtctcagctggtatcagccccagcctgccttgtgccatatctcagcttggatctctgctagagtccccccaaccatatatcatagagttgaatcacaatgagaccgttggctttgaatttgagtcgttggttcccatggtgagatgcttgttaagactttatacttgggtcanatctctcactttattttngtagaaccatttgaaatcctanggatgtgcttgttnctggnaaggatgacatngggccncagactgaacaagntcagcttngatgantcttaaatgatnnggaagtatanggacgttgcttnattttaanaacaangggaannggacacaaaatggaatgacntgncttagtncctttctcagantacntcttnaaaacanattnttttanttgttaanatttngtggtaatacatggtcacaaccgtggatcaaacaaggtcagtctaaagtggcaggtcctaggtgtgacctgataccaccaccctttgtggcagcaccgggctggactgccctgatccctgggacgtgagacttagcttccagccagtgtgaatcattgtatctgtctcataatcacagcacagctgcagacacaacaacgtgcagcattttttacataaaaatatnggtagaattaatttatgacatggaaatgccttacgtggtatcacacttagtcttgaaaaaaacaccaaggtgacgtttaaaatttttagtacatatcctcaaattggagctaagttatacttcttttataaccttttgggcatctggtcgagagaagacaagattttctctatttacagtgaggcaataaatatgtttgccacctttggactgccgttactgatttgtaacttgaaaaggctatggttgatcatgaccccgcctcccccacctcccttataagatgtggacgagagctttattgacctactgactataaaatagtaaattctagattttatcatgtgaaatgccacttgctaactttttctagtttatttggttccaaagttcagaatgaatttcagcagcacagctgtgangactcaccatatccgggacaggcgggtgggcagtcagcgcgatacagaagcaatatttaccttaaaggctcttccccagacaaatagaagttaaattagctgatggatatttcatcaaagagatggactttctcccaaaattaacgtgggaggaaattgaggtactggtaaagtaaaactcacctctgacagcctgaacctgagctcaggtgaggaaacctaaccattgaaactggtaaataaatcctggccgggtgcggtggc

SEQ ID NO: 891 - DNA, 275 bp, Homo sapiens
  SITE (63): n equals a,t,g, or c
  SITE (128): n equals a,t,g, or c
  SITE (170): n equals a,t,g, or c
tagggaggctgaggcaggagaatcgcttgaacctgggaggcagaggttatagtgagccgcgantcgtgccattgcactccagcctggacagtaagagtgaaactccgtctcaaaaaaaattctagttnatgctaatctgatctcagcttaattacacataatccagtatntgtctcatcagtgaattgctaacacccaccctcttcacaggattaaggattagcagatttactagaaagcacaaaccctcatcaccatcaccccacccactccct

SEQ ID NO: 892 - DNA, 319 bp, Homo sapiens
tttaaaaaaatttttttggcttttttttgttttttttgagacggagtctcgctctgtcgtccaggctggagtgcagtggcacgatctcggctcactgcaagctccgcctcccaggttcacgccattctcctgcctcagcctcccgagtagctgggactacaggcgcccgccaccatgcccggctgattttttctatttttcgtagtgatgggatttcactgtgttagccaggatggtcttgatctcctgacctcgtgatccgcctgcctcggcctcccaaagtgctgggattacaggcgtgagccgccgcgcccggcca

SEQ ID NO: 893 - DNA, 360 bp, Homo sapiens
taaaacctttcccctgttgcttccggattgaatcatagttaggaaagcttttcctattcccagcttagaagaggaattcacccatgtttttttctagtactgattttctttattatttaagtttagatctcatatctatctggagtttatcctggtgaacaatgttaggaagtgatctacttagattcttttttatatggctacctacttgccccaatatttttttttgaagtccagtgaaaataaaataaaatatcactttttgtttacatgtctgttttatgtagttctgggttgatatagatatttcagataatagtgcaaacaatattataacattgagtaagaaaacacaaaagg

SEQ ID NO: 894 - DNA, 685 bp, Homo sapiens
cagccctctgcggcagaagctgagagcactggctcttgccctggcttgggttggccacccttgctggagggtgttctgcagggaccctgcttttttcctaccagttcaactagttgtactatacaaaactgtacagtggtgactaaccagggaccggatacagcttgtttagatttgagataaaacctactgtttaatttcacgaacttccctggtgaaagccaaacttagctgtgtcccttgtcctggtcactgcttggctggtggtggggcaggggtgaataaggctactgcaaggactgggagcgtagcctgcgggaggcagtgaggagcctagcctagcattgaggagactgaggaggggggcattttaaaaataaaactatggcttctgccaagaagagaaaagcagctgatgaaaatcatgtgtttcaaagtaagtagactgagcgatgcttattatttgtgctgaagatactgtcatttgtctgattagcaatagaaaacaatcttattttaaagagcacagtagcttgtaagttcagtcaggaaaagacaaatacacagcctcagaagactcctctgcagggtaaagcaaatttggtttagtgcgtggcattatcatgagtccctgaaggctgtgctcattaaagagtgttgacatttttttagccccccaaaaagg

SEQ ID NO: 895 - DNA, 9581 bp, Homo sapiens
ttttccagagatcacgacaagatctaaccagtcgcgcgtggtccccggcgccggagcgggccagctcagcccggcccagcccggccccgcgcagagcccccgccgcccccgcgcacagagccgggtgccccttgcggtgcgccggacgggaagccccgaggagcagctgctgcgcccgccacccgggtcgtccgtccaccgcgcgcgccgccgcccgggccgggggtccgagccgcgcgcccccggccccggccccggcccccgggcgcctgggccggatgtcccgatgagagagccggcgctggcggccagcgccatggcttaccacccgttccacgcgccacggcccgccgacttccccatgtccgcctttctggcggcggcgcagccctccttcttcccggcactcgcgctgccgcccggcgcgctggccaagccgctgcccgacccgggcctggcgggggcggcggccgcggcggcggcggcggcagcagcggccgaggcggggctgcacgtctcggcactgggcccgcacccgcccgccgcgcatctgcgctccctcaagagcctggagcccgaggacgaggtggaggacgaccccaaggtgacgctggaggccaaggagctgtgggaccagttccacaagctaggcacggagatggtcatcaccaagtccgggaggtagggctgccggccggctggaaggcgcgcgggcgggcgggcgggctggggcacgggactgcacggatcagagcagagctggggactcccggctcccggctcccggctccaggttctggccctgacgccacgcttcgctcccacggacaaccaagttgacttttctcgtttggcaccggagcgatttttttttaaaacaaaaacgctaaaatcctccgaatgaaataaaacgaaaacatactgctaaagaatagccccaaccgttctgagtcccagcgcagaggaggccccgcggcttggccctggcggtctcctccgccccgcgctctcgctcttctgcgtccgggtccgtctccgagctcgggggaaattcagcctctctcagactctgctccgaccccgaagcccctagtgggacctgggcccagctaaccccacgctggttgctcggttcctggcagcgagccccgggtcagccgagccctccgcctcaccgggctgggagccctttctccaccgcgggcatccgagccctggacgcatccgccgccccaggccttaaagcctgaagaaagccacagccccggcccctccacccttcgactcagccaccgagaatccaggcctcgggttcaccctcttcccccgaactgcacggccaggatgtcttatcaggctctgtagcccagttcccaatacaaacaccctccagatttatttctgggagcttccgtcccaagtgggtatttcccctgaacgaatttcggggagattaaggagaagcgagaatatttctagagggcctagacttctctcctgggcatcagctttcatctcagatcagggagaaagagggtccccagatctgagcacaaggcctaaaggaggctgtttaggagagggtctgacaggcagaaatgggatctcctgggagcaacaaccacaggtggggtcgtccgggcagtgatgagagggcagagcagccgaccacaggggaaacagccaggcggcagcggtgtgcgcaacgaggagggataaataaaggaggagtggggtcctggaacctagaacagccggttccaatgggatctcctcccttccctccctcccaggcggatgttcccccccttcaaggtgcgagtcagcggcctggacaagaaggccaagtatatcctgctgatggacattgtagccgctgacgattgccgctataagttccacaactcgcgctggatggtggcgggcaaggccgaccctgagatgcccaaacgcatgtacatccacccagacagcccagccacgggggagcagtggatggctaagcctgtggccttccacaagctgaagctgaccaacaacatctctgacaagcacggcttcgtgagtgttggggcagggtggggacggtgcaggagcttgttgacccagcactgcagctgagcaggagagcagggcggcaggatctcccagggggaagcgctgggcaaacccccagagtgcccctgcccgggtcactgccctgtggtctacgtgggctgggcctgggcctgggccccagcgctctcctttgcaagcctgggaaatggtggggtcagtggctggcagctcacaatctcagttcctcaggccgtggagggtcccttgtaccgtcaatagggaggcaggtgctgccaggactgggtctgcagtgctggaccacggaggtcaccctgctcttggcctgtaggtgccgagcttggaagacctgcccatgacctcaacttgtccatcacccttctgccaagacccgcgtccctggccctcccccaagactaggggatttaaaagttaaaccaccctccccacccacccccccagcctccctaagacctttccctcctcccacaggcagatgcccaactaggaggagagggtttgggggttctctccatttatgcctgagcaaggccccagcgaacgggggtggtgtttcatagggtaaaaggaactgcccattctgaggtagggcagttggtgagcccccgaaggttggaatctcctctttgtggggttagggggtttaccagtgccagaaaggaagagagtgttaagagtggaattgtagggctctgttttgttttattttgtttgggtttcttttgtggggaggggttgttttttggttggtttttttgttttgttttttgttttgttttgtttttgctctgtctcatttctgtttccaactgggaaattttttttaatggcaagagaaaaagaagctgtgaaaagagaaaagcgagaggaaaagtagaagaaaaagaaataagggtgagaaaagagcagagacaggagaaaatggggaagaggaagaaccgatagagagagagagagagagagagagagagagagagagagagaaagtggagaggaagaggtcaggtacccaaagaatagaaaagctcgggccggggctggtggctgccggctgacccccaccctccccgcagaccatcctaaactccatgcacaagtaccagccgcgcttccacatagtgcgagccaacgacatcctgaagctgccttacagcaccttccgcacctacgtgttcccggagaccgacttcatcgccgtcactgcctaccagaatgacaaggtgcgcgcggcgggcggtgggctaagcccctgcactgacgcccctcaacacgtgcaggcccaaccgtccgttcatcgcccctcgaagccccctgcacgggatccgcgctcttgcggcccgcccccgagcaccgagcctcgcatccatacgcgcagcactcacggaagtcctcaaggcgccctctcaatcccaccgcgcgcacacacaggctcccctggggcgagcgaacagctgggccgtcgttctgatggagatgtttacttaacaattagctgagactccgggcccgcgctgacatttttacattttattcgtttatttcttggctcaggaatgagaatgtaagtgaagagagggcgcccgaggcaatctgcccaggctctaccgatgctcagaacccggggcccagttttcactctctcggggggagccagagggtgggacaggtgacacagccccccaaagcactcctggctactgctctgggtcagtctaggccccagaccccttgggaggcgcttagagaattaccttccaatcaaagggctttttctgcttgcggcttctccacccttgttctagtggggcagagcatcacccctctaggcctgtgcccttgtgcgccactgtcgagtgaaagagagggtacgagtgtccgtgccggtcgttgtggctttgtgaaccaaggtgtacgctgggctgtgcgtgccccgtttggggtgtgttggatacctgtggaggcatgtgaattcgtttggttccgtaggcgtttgttatgtctgtgcacacttgcgtgtgtgcgagcccgtgagtgtgatttggctttgtgtgtacctgcagccttgcgtgtgaactgcagtctctgttcgcgcctgctcgggtgcggagtcgtttaacttgcgcaagcccgcgggcgggtgtgcatgcttgggctggttccgacactgtggcactgctttaggcctgtgtggggctgtctaggcctgtctagggataattcctcgaatgaagcttttggaggacagaccccgtcgctttccgcgaggccctcccaccggcctcagctcggggcgtcccatcccaggcgggtgggtaccaagtggacgctccccgggtcttccctctgcggccagcacccgctgacctcggggtgccaccgaccacgctggaagagccacggcctgacttagcgccgcccccttggtccccgcagatcacacagctgaagatcgacaacaacccgtttgccaagggcttccgggacaccgggaacggccggcgggagaaaaggtgagaggccgaggacagcagccctgtggcgggtgcccgcgggagcagcgagcaggagggatggagggatgggctccccgctgacctggttcatccgctcatccccaggaagcagctgacgctgccgtctctacgcttgtacgaggagcactgcaaacccgagcgcgatggcgcggagtcagacgcctcgtcgtgcgaccctccccccgcgcgggaaccacccacctccccgggcgcagcgcccagtccgctgcgcctgcaccgggcccgaggtgagggtcggaccggaggagggacagggaggtggcggcggggggtcctcaggtcgctgggctggtcttttgctgagccacccgctaacctgaaaggccaggaaggaaacgtcggcgagtgtctgggatggggtttccgtcccgggactcccctacgagggcggtccccggtagccagaagatccggccggactccgagcctggccccttgggcgccgtgtaattctatagctgtagggtttcctctccagggctgggttccttccactgtaaatctggggtcttggattaggtgacctgcagctgccctttgcccgactccagcagctcctccgactcggcctccccgagagcagcccttcccgagtgtccctgatcctgctcgtcggcctccgcccaggcccctgtaatccgcgcgccctctccccgcagctgaggagaagtcgtgcgccgcggacagcgacccggagcctgagcggttgagcgaggagcgtgcgggggcgccgctaggccgcagcccggctccagacagcgccagccccactcgcttgaccgaacccgagcgcgcccgggagcggcgtagtcccgagaggggcaaggagccggccgagagcggcggggacggcccgttcggcctgaggagcctggagaaggagcgcgccgaagctcggaggaaggacgaggggcgcaaggaggcggccgagggcaaggagcagggcctggcgccgctggtggtgcagacagacagtgcgtcccccctgggcgccggacacctgcccggcctggccttttccagccacttgcacgggcagcagttctttgggccgctgggagccggccagccgctcttcctgcaccctggacagttcaccatgggccctggcgccttctccgccatgggcatgggtcacctactggcctcggtggcaggcggcggcaacggcggaggtggcgggcctgggaccgccgcggggctggacgcaggcgggctgggtcccgcggccagcgcagcaagcaccgccgcgcccttcccgttccacctctcccagcacatgctggcatctcaggtaaggcctgtgaccccgcggcagcgccagcgagggagaaggcccagggagctggcggcgaggccagcggagggcctgaggggtgccagggtcgctgggatcctctggcaggcaagaactccatccaggggaggccccgggatgccctttaggacacctgggttctgagagacgaggactgtgttgtaagtccaggggctggccagggcgccgcttctgactcccgtgtgacctttggcaagtccctgaccctctctgggcctgcttccttccctatagccccagcgaggagtgcggtgcccatcgagactcttctcaccctcacagaccagggccacccctggcttgtgaagtcttctctcctggcctcaggacatttttcttgagaacaaagacccttggctccctgtccattctgaaaggctaaggtggccagacagacaaagggagaaggaacatttgcattattttctggacagttgaccaccagccctcccagaggtctctggcccctcccaggccttctacgaagtcctctgtcctggtgaaggacaaggctggtctttcccctaccttgagttcccagcacccccagccacatgtcagggatgagaactcagctcttcaggccccattgaaattccaagctcccaggggagtgttgacgaaaatgtggctggggcacagtaaggagatccgatggggacagtggcctctttggttgcttgggtggaatattccctgtggaaagatttggaatctcttcattcattttcttccctctgaggtttctggcaaattgaacccctgagatcttatctcaagggaaggaaaatagcagttcaggtctgagaaagctcctttgcttcagcagcaaatattttaaaagttgggttggtgggtgggggggtggggggttgggaggcaggcgattctgaaatgagttttacacacagctcagtgttagggtgtgtggagtgtttgaggtatcaccatcactcatctggggctctgggctggaagggaagcctctggagaaagttcagggcccagaggtttaatctgcacccctgattatttgtgtatatgaatgcctcctccccagacaaactggtaataatcaccagcatcacagaggtcatgaggaagtcagggcttctagacacagcctggccaacaggtgcatgacccgggtgagaataccagcacctgggaggcatccgttggtagggctgctggtggttacattcccaggccagtgcagcccatcccagacatcaggtagagccaaatcccaagagaactgaagcctccctccttcctcccaacctgggatgccaggtctgaaatgcccagtaggacctgactgtctcaggagggggtattttctcaggcctgatgaagctgcctcttttcttcttcctgctagagccaggcctgaggctccctgggagcccagtgcaatcatcagccccctgccctcctccccatacccactagctctggggagtaagccattatctcaaaggtcaggccgtgcaccagccagacctcatgaactcaggaaggtgcttgtccaggagttcctggctgctgtgcccttcacaggcaaagactgcattccttcctcagctgccagtgaggtgctgccaggcattccctgtagaactttcaggccagtttatgaactggttggcacccgtgtcctcctcctggcccaggcaggagaaccatgagcaggcagaaggagactttgcaaagtgccttccccagcatgtgtgccctctgcccttcagagcctgcagataggaggggtggcgaggacactgttctcaatgagcagaacctccaagacacccaaagctgcctgtttgccacctggccctatgcctgccccgttttctccctcaaggccttcacccgtgctagggcagtcacctggaatgtcctttccattacccctgctgtaatgcccagcacagaacttgatggcaggcctttgcatggtagcctgaagcgatctcacccttctaactgggtttggccacaggcacactggctcatgcttacctgtgctgcctgtggttatagttatgcgaattgtggttttacatccctaaaacagaagggcacggtgtccaggggatagcacccagcccaacttcagaaagacttcaggcaagatgtctaaccctcgtcttgttctgtttcttccagggaattccaatgcccactttcggaggcctcttcccctacccctacacctacatggcagcagcagccgcagccgcctcggctttgcccgccactagtgctgcagctgccgccgccgcagccgccggctccctctcccggagccccttcctgggcagtgcccggccccgactgcgtttcagcccctatcagatcccggtcaccatcccgcctagcactagcctcctcaccaccgggctggcctctgagggctccaaggccgctggtggaaacagccgggagcctagccccctgcccgagctggctctccgcaaagtaggggccccatcccgcggtgccctgtcgcccagtggctcggccaaggaggcggccaatgaactgcagagcatccagagactggtgagtgggctggagagccagcgagccctctccccaggccgggagtcgcccaagtgaggggctgcccagctgctcccctgccacgcaggccacccgggctgcctgcccctgctgcttgggacgtgtacagcacagaatgagtatttatttaaataaaggagaaaagtgggctgcagcagccggaatagagcctcgtctggcaagtcggggcctgggacacttccctgggcctcaacaaggatcaggctgctggaaacacagtcacttgggagctgctgggctaggtccagatccgctccagcgtcaaggtggcatccgaaggtgtctctggtcttccagcgaggtgggagaggcctcatccagggcccagcggtccctgcagaagccagaaggtgcaggggccaggggtgggagcatcggagggagtcccagagccctggaccttgggcctagaccgcgtgataaaactgggttgagggatgctggaaccagttacgactgaagtcagtgtagacctgagctgggagggaacctgttagtctccccacctcttccctgaagagacaggcacccctcccagccgtggtcaacggagggagtggcacttctgccttgagtccccaggggaaaaaaaaaaaagatatttatgaaataaatggtaatttgtgtaaataagctttaaggttcccagaatatgcaaattggtattaatttattcaaaggtgtacattgctgtgtacatatatttagagattaactcatacatttaaagtttttttcattttacgtgagcatctatattgtacagggctgggggggcccttggctgcgggagaaggcccagagccctggaggagccaccaccccgccggcccctcgacccctcggcccctcggcccctccgcccgggtttggctcgcccggcccgcgggctccacctcaggttttcacttttcgctccggagcgagaacgaaacgacaaaaacgcaagaaaacaataaaacgctagaaagcgaagtgaa

SEQ ID NO: 896 - DNA, 6134 bp, Homo sapiens
tgtgatttggggtaaagtttaatggaaaagccgtggaaacgttgagttcacaaacaggacttcccgtgcaactgtccagccagacctggggcagctcctggggaccctgcccccttcacacacacccatcccatccatggtgcctgagaggccttcatcttcagttccctccaccagatcagttgggcatgttgggggcagagatggagggttgttgaatcacactaggctctgtaagctgagaagacgatcctgcacagggtggcataagccagtccctcctgccagggcacctgcagggcgagaagtcacatgccagactgaggcatgcttgcgaacactagcctggccccagcagcagggggtgctggaggagctgcagcttttccccatcttgctgaattattgatgggcctggcactgcccctacccccagctacagccatgtttcaatcaaaaagggacaaggaggagagtgctaccaggctacctgtgcatgctgcccatggcctgtcttcctggggatgggttcagctgccctaggaagcatgagcccctctgaaaccaccccaggacacgtggatgtggcagagaccttgctgccaggggctctctcaaccattcagggaactggctggcagcttacagagtcaggagtcctccctggcccggcccttcccctccagcaggggcaaaacagctgtggcctcccccaggcagggaaagtggtgggtgtagggctggacttgccggctgagcttgcaggacaatctggttattcatctgcttgaagtcagggcaactctttgagtatgtgggggaagggtgaggataagagagaccagataagctggccccacagcggctgccactggagctcaggttatcagaaaggccttgggcctggcctccggctaattggggaggttatggagcctgccatagcctgtaatcagctggaagggagagctgggccccagggttggggaccttactggccactggccccagagcagccgcttcctatcctctacagataacatccagggcaatctgggactcacccccagccccagcagacctaatggtggcatcatctgggagggcatcagaacatgaatcaaactgtggctgatcaggggacctttaggaatccatgtgacctaccgattctctcggcactacctggtcaacgggcagctttactacggacttcctctcaatttgatgaaggaaaaataccttcatgatctggaaagaggccggtgggagccagcgtggcaactgaaggagcaagagtactgtctgagatgagaaaaggcacggtgggcctgaggccaattcaagcacacaagctcaaacaccagggccagcccctctgtcaaggagcagaggccaggctaggcagccaccagtctggaagtgtatatggtttctcagtggtaattttttattttcacaattcagggactcatgaaactagaaagtacctgagagttctgttcgagcctcattttttttgcagatgacaagcaagcctgagccccagagaagggcagggccttgcccaaggtcacaaagtcacacgcctagtgagcctatccctgtctgcacctggctgcttcacaccctggccagttcccttagagggacccaaatccgaactgacctccctgtcctgtgcccctatcccatccagaatgctgaccccactgatccccatcctgactccatcaggcttcctgcctgggctgagagactgaatttgcagctgctcccttgcccctgtgtagctggaaggcagccctcccactgcagacctagaactggaggctctagaggcaaagggacagtgcatcctgtatgtctcgaattcagagcaagagcccaggggagggtggcagccctggcatctcaggatcaccttgctgtaggagcaggggtaggcagctcagcagcaccggcttcttaggagtgggtttggacttgctctctttaaggtcccagggtcccatcccagctctgccaccagcaggtacgtggccttgggtacatgactgcacctctgggattcagggtcctcatgtgtaaaggagggagtggaggggagagagcagcatgcccttccgaaggcgcgacagagcagaagcaggcagaggggaagctgcgggtccacaaggcaaacccatggttcgaggggaagttgacagccaggccaggtgccccttagcagggatggggagggcggaggcggcacagctggagcccggattgtggcacgccgtcaccgtgctgctccggggaatcccgacccgctccctgcgaaagcgtttccgaacgcgaacccagagcctgtgaacgcgccggcaagccccccactcccccaccgccgcccgtcgcaggtgggcccgtcctaggggtccttcctgcgctctaccccgtctctcaagtcactcagtcgatcgccccgttcacgctcccgtgatcccagacatccataaccacgatctcgcctccatgcacatccaacgcacgacggtgcacagacgtgcacctgacttctgcggaccaggtgtctcaagcgtacagcggccacccgcggaaccgcggcccggggccagtgagtcgtctgcagctccccgggttaggggattccccagaactccgggaaagtcacccgaagtccatccgggatgcggccttggttctcggccgcgtgatctcgcccttaggtgcagaacgacgcccttccagggcccacagctgccaggctgggccttgccctcgcatcccccgggaagaccagggacggggccacacaggccgtggctgcggagacgcttccccgggccaccccgcgaccaggagggagtcgagccgcccgctctccccgcgtcccccgccccatcccagccagttggccccaccctgcgcgggataattgggacgggagggaggcgacgggagggcggcggctccagagagactgcgcgcctgtcagcggcaatttgtttaagtggacgggacgggccgggccgctgcgggctggggtcaccgaggccgcggcccccaccccaaccagacctgggaccgcgggggagcccggtccggccgctaaaccgggctggctggcgccagggctccgggaggtgcggtccggcggggaagccgtgatgggaagcgactctgtccagggagtgtccttcaccaccacactcctcacgtccaggcagtgatcgacggcctggcggcaccctcacagcgggcccatagcacggggccacacacgtcccctgagcttagcctgggcacattcgtctgccaccgagggcttaagccagtctgcagcccgcgccccgtcactcggacgcaagtccgtcgtccgctctgccacgcggccgcacagcccgagcttcctgctgcccactgcccgcggggtcacgcaaccccggccctgcacacagaggaggaagcggcggggaccccctgccacctggaggctcaacccggggaaggtcccagcagtgccccttaaccctgcgagaggtgacggggccggaggacggaagggcagccacgccaggctcaggaccgcggccccacccggcccaggccgtccccgctcccgccccatttcactgttgcgggaagcgcggggcgcacagaccgcgcgccaccagcccaagcccgcccgacgccctggccggagaccgcctgcgagagggaggggcggccgagcgcgcgtcccccgcctgtctgcgggacctggccgatgcgaagtgacaggggccggagctttgttgtggagcctcggccgcctggcgccagccgcccccgcccgcgccctccccctccagccccgggcggcccgcgaggcgccccccggggcctcttaaaggaacacgcacactcggcccccggggctccgccaggggagggggttcctgggaagggggagggggccggcctaggtgggggaggggcccagcggaggcctcacggcgccgctccagggcctcccaggcctccccagcgccagctttcggtgagcctcgggcattcctagctggagagtttggctgggggtcgctacagactcttcagagcggctgcagcaggacctcagggtgatcgcgggaccgcggggcggggcgagtggtgggatcctggcccggacagagccccggaaagccagagggaaggtcggtgccactgtaggtggggtcgccgtccccagatgcagccgctgcactgtcgccgccaggtttctcggtcaaataacccaggcctgagtgtttcaaactcttcaggcctcggacccctggaccagctatggatggactaatgaaatggactaatgtctaaaacgcacacatttagatgtacacatactcttacaaggacaaaagtatgtgtctacacacacacacacacacacacacacacacacgcgcgcgcgcgcgcgcgcgactttgcgaatgtattcacggattcctaggccggtacctgggttcccggctaaggaaagctgccctggttattatctggtcacctcaccggctgcgcaaacgtgtccacaacgggtccctccccgagaggccacatctcgcctaaggtggagccagcaggtatttgcctgtggaaaactgcagtggatcctgccccgtctgcgtagactgcgcagctcggagtcaaagattcgttctggccagagaggaggtactaagagaggtgcgacctagccaagaacgaggtcgtggagaaaaccctgtgggggcggcgctcacatatgcggtgatgaggagttgtgagggccctggggtcggccccgaaaagtagggataacggtcgcagaggccatactgcttccgccggtcccgaatccgcactgccaggagagatccggccttcaaacgctgctcccaacgttcaacaacgaagtgccctgcgaccggtgtgcgcagtgggcgggcgcctgcatgggtcaatgttggatgtacgcgcccaccacgcggttgtacgggtgggaatgtcacccgtggctagtgcatgctctgtcttttccttcagaaaacgaccttcaggaatcagcctgagtgttcgcgcccgagcccgattggaagcaggtgcgtggtcgcttcactctccccgtgcacaccttgagttatagctctcgctgcgcacagagggcaccacacggggcccgacacacacacacacacacacacacacacacacacacacacacacaccatcacttcatgggggggaaactgaggctgccggaagacagaaaacgaagactgatcacagaagagggggcttcaatcacaggtgctcgcagacaccccaactccctcacgcgttactcagcactccttaacttaggagacgtgcgcttccgagagatgagaagaaactaaaaaagtggttggcagggcgaagagaggaagccggtatttcggaagaaggagactttcgtctccggtaccggatagggcgaaaattcgttgggtcgcgggtggagaatccggggtccgcccgcgcggtgccgccctgtgctcagcgaaaggtgcgctcaccttcctggccccgaggatccgctcctcccggccgctggaaagctcagggcggggcccgggcctgcggagaactccaggttccttccgagtcttccggtgaaggcgggcgcgggtagggggtccccgcgtttccccagcgcaaggccgcgtcccgctcccgcccgcgccggccccagcagggctcggccatggctccactcaccagctcccgccacctgggatccgctcccggacctcggccgcccgagcctcccgactcgcccgcccaccggcctcgctttccagtgcctgctgtctctttccggggcgcagggacccccaggcggcgccacgacccggagctgggtcggaggccaggctggggctcgggccagagcggccgggcctctgggcgcgggagaaggagggcgccccctctccgctcggggtcgtgtcaatgctttgcacttggggccggcgtgcggctgcgggtccttccccaaggccccgggacccgggctcccctcgcctcaggccctttcggcgggtcaggtcggccctccgcgctctcca

SEQ ID NO: 897 - DNA, 1529 bp, Homo sapiens
ctgagattacaggcatgcaccacgacgcccagctaattttttgtatttttagtagagatagggtttcaccatgttggccaggctggtctcgaactcctgacctcaggtgatccacccactttggcctcccaaagtgctgggatcacagatgtgagccatcacgccaggcctgttcattattcttgatgatctcacatttgacttacagtgcacttttatgtcatgtgatgaggtgatacgtttgaagatgaaagagggcatttaaaagtagctgaggacagaatcagaactttagtagttacagtgaggaagtcaaaatctctccccacaaaacaacaataataccagacaaaattgttaaaagcaactgtttcagggctctagaaatggaataaatgcaagaaagaaatggagaagcatttatccaagagaaactgccaaacttcaggtaagaacaatgggagtctttgactccttgcctaaatggtagggggttactcccatcccttcctgccattggtgtggtaattctgttagggtacagcaggccgtgaaaactaacagcttggctgccagaggtaatgcgcttgatttggagcaggtgaaaagcccctgtccggtggcattgacagtgaaagtaatgaccctcagtagcaagagaacaaggaaggccaacagttctggtagtgagagagctatcccaagtgggtcaagcaacagactggcaaactagcccaaaacttaattaacagagatcctggaaatgagacagttacagaggggtctgaagggctgtccacacatttctggctgacttagaagcctctgcacacatgcaggtaaaactagagagatcccatggtacccatttgtccctggttggctgggaatctgcatgaacgtatgaaggaaatgtgacagggctgatccgaaaggaaaagtgggatagacctgaaaactgcttgaacttttgctccctaaccctgcacagacccatgggcagaggttggaagcctagtaggctcaagagatgcaaacacaacctgtaaccaatcattgcctgatcactaagctgtgtgtcagcaagtcaggcttaaaaataaaaacaagaatttgaaaagaaaaactggaaaaaagaagaaaagaaactgagtagagacatcaaatagccacacatcacaggggagacagattttgtagatttagtcagggcaaattactaaagaaataacacacgtgaaaaattacagttgagagttgctacaatatattatctaaaacatctagttttttaaaattatgattatgtctgtaatttattatggttatgtctgtaaggaatggctacagaaaacaaacagaaaaacaaacactaatgggacaaaaaaaacaggaaagggtggttcatattcagggaagataatcagtcaatagaaactgtctctgagagagcctagatgttaggtttagtaaacaaagacttcaacacagctattatacatgtgttcaggaaatacaggaaactatgc

SEQ ID NO: 898 - DNA, 1529 bp, Homo sapiens; identical to SEQ ID NO: 897

SEQ ID NO: 899 - DNA, 1529 bp, Homo sapiens
ctgagattacaggcatgcaccacgacgcccagctaattttttgtatttttagtagagatagggtttcaccatgttggccaggctggtctcgaactcctgacctcaggtgatccacccactttggcctcccaaagtgctgggatcacagatgtgagccatcacgccaggcctgttcattattcttgatgatctcacatttgacttacagtgcacttttatgtcatgtgatgaggtgatacgtttgaagatgaaagagggcatttaaaagtagctgaggacagaatcagaactttagtagttacagtgaggaagtcaaaatctctccccacaaaacaacaataataccagacaaaattgttaaaagcaactgtttcagggctctagaaatggaataaatgcaagaaagaaatggagaagcatttatccaagagaaactgccaaacttcaggtaagaacaatgggagtctttgactccttgcctaaatggtagggggttactcccatcccttcctgccattggtgtggtaattctgttagggtacagcaggccgtgaaaactaacagcttggctgccagaggtaatgcgcttgatttggagcaggtgaaaagcccctgtccggtggcattgacagtgaaagtaatgaccctcagtagcaagagaacaaggaaggccaacagttctggtagtgagagagctatcccaagtgggtcaagcaacagactggcaaactagcccaaaacttaattaacagagatcctggaaatgagacagttacagaggggtctgaagggctgtccacacatttctggctgacttagaagcctctgcacacatgcaggtaaaactagagagatcccatggtacccatttgtccctggttggctgggaatctgcatgaacgtatgaaggaaatgtgacagggctgatccgaaaggaaaagtgggatagacctgaaaactgcttgaacttttgctccctaaccctgcacagacccatgggcagaggttggaagcctagtaggctcaagagatgcaaacacaacctgtaaccaatcattgcctgatcactaagctgtgtgtcagcaagtcaggcttaaaaataaaaacaagaatttgaaaagaaaaactggaaaaaagaagaaaagaaactgagtagagacatcaaatagccacacatcacaggggagacagattttgtagatttagtcagggcaaattactaaagaaataacacacgtgaaaaattacagttgagagttgctacaatatattttctaaaacatctagttttttaaaattatgattatgtctgtaatttattatggttatgtctgtaaggaatggctacagaaaacaaacagaaaaacaaacactaatgggacaaaaaaaacaggaaagggtggttcatattcagggaagataatcagtcaatagaaactgtctctgagagagcctagatgttaggtttagtaaacaaagacttcaacacagctattatacatgtgttcaggaaatacaggaaactatgc

SEQ ID NO: 900 - DNA, 1529 bp, Homo sapiens; identical to SEQ ID NO: 899

SEQ ID NO: 901 - DNA, 378 bp, Homo sapiens
atggacagtaatttagatccacaagactaaaggaagaacaccaaaattgccaaatatttgggtaaatgtaagataatatataaaaatagctgaggcttaaagtagtaaagaacattctcctggtaagaggaaaatgataacaatggaaacttgagtcaatttaaaggaataaagaatgctaaaaatagtaagtatgtaggtaaacataagaaattttctaatgttgtaatttttctaaatggtaattgacagtaaaaagcaaaaataataacaatgtattatggagttaaaacatgtagaatagagagtaaaggggtgattcctggaggctgggaaggttagggggtagtgggagggaagtgggttagttaattggta

SEQ ID NO: 902 - DNA, 378 bp, Homo sapiens; identical to SEQ ID NO: 901

SEQ ID NO: 903 - DNA, 481 bp, Homo sapiens
cagcaggggttcttattgtaagtgtggattcctggtccttacgttggacctactgaatcagaacctctgggaagggcatggagaatcagcattttgagcaggctcttaggtgatttctatacatattgaagtttacaacctgttagggtcacattgtctccccgatttcccatttggtgctacactaaggaaaggctaacagtcactttcctcttctttccattacatacacagattttctacaactgtgaatcctgacaaaccctctttgctttactttgggtggagaaactgagcaatttgcttcttaagcaggcttcatttacgtggataattcccagagatcagtaagatatgactgaactcacttcctttctagttaagtcttctcttactagcatccatttctctgaaaccagaagcagaggctgacaccatcagccaccaacctgcagtgtcatggagttaccaataccctttc

SEQ ID NO: 904 - DNA, 481 bp, Homo sapiens; identical to SEQ ID NO: 903

SEQ ID NO: 905 - DNA, 389 bp, Homo sapiens
gatttcttggctgtatgatatagggttggttgtttaatctatcttcatctttctaatgtggatagtagtagtggcagcaccaccagcagctatttcatagagttgctgaagattatttaagtatccgataagtggtaactatggtgacagttgtctgcctgtgtttgctaatgatgaacgtattcattccctcactcattgattcactgagcaaatatatactaaggatgctctaagggccttgtcccatgcctgcgttctggggaaaaattactggttttatattgttatttgcatttcttccctttttttggcaaaagcaaatgttttcttattttggtttcatttatacttttgcagtgtttgtcaaagtgtgttctaaaaactgc

SEQ ID NO: 906 - DNA, 1026 bp, Homo sapiens
ctttttaaaaaaattattcttcacttttttgcctcctattacttgttagggagacccaatggtagttttattccttggggatacatagtaaatacttcattaaagttgagtacagaatttgatgaaaagtgtggatgtgtgggatgtactgccgccttcagaagtccacacactgcctggagggagagaactgctgtttattcactgattaagcacttgctgtgtaccaactacttttcatgtcttatcttaattctcataacagtcatttgatattttaaaaaaccccagaaatctgagaaagagataaagtggtttgctcaaggttatagaacagactaccatgtgttgtatttcagattttaattcatgtttgtctgattttaagttttgttcgcttgccagggtaccccacaaaaatgccaggcagggcattttcatgatgcacttgagatacctgaaatgacagggtagcatcacacctgagaggggtaaaggatgggaacctaccttccatggccgctgcttggcagtctcttgctgcatgctagcagagccactgtatatgtgccgaggctctgagaattaactgcttaaagaactgccttctggagggagaagagcacaagatcacaattaaccatatacacatcttactgtgcgaggtcattgagcaatacaggagggattttatacattttagcaactatcttcaaaacctgagctatagttgtattctgcccccttcctctgggcaaaagtgtaaaagtttgctgctacaaagaatacagaaaactcagaaagaaatgctaacatacacatttagctggccctatggatatatcatattaactgcttatcgttaggggctgtatatttgtaaaataaaagaattttgggagttccatctctcggctttggagcccccctccttttgtctctgtatggaggagcttcgtccttctgcctttttctttacctgttaaattctccactccttaaaactaaaaaaaaaaaaaaaacaaa

SEQ ID NO: 907 - DNA, 389 bp, Homo sapiens; identical to SEQ ID NO: 905

SEQ ID NO: 908 - DNA, 1026 bp, Homo sapiens; identical to SEQ ID NO: 906

SEQ ID NO: 909 - DNA, 420 bp, Homo sapiens
gaataaaaacaagacaggcatcaagtctggtacagcttcatttatttcttactcttcctaccgaattgagtttgcatccaggtactcctcatgcctccgttggcagaatgatgatgtaatgaacgaacagcatttacagtaaatgacagcaaattgctctgtaattcaagggctaacccatgtgccacacaatgatcttttgatgtctgtgaatttcttcaaggtgggtggggaagctttttgcttgtagggaaggctctggatggactgagcctctgacatatcaactgtaaatcctggagtcctggggctttattcggaggaagaaagcaccttctacaggcagcagtagagtggactgtcccagaatcgagcccactgccctgagaattggactccacaatggccagttggacattg

SEQ ID NO: 910 - DNA, 326 bp, Homo sapiens
tgattagggaggacaagaggggggctcctcaggtgccaagagccccctgttagttcatagggtgctgattacatggtaaattttctttctttctttttttttgagatggagtcttactcttgttgcccaggctggaatgcaatggcgtgatctcggctcactgcaacctctacagtatcctgggttcaagcaagattctcctgcctcagcctcccaagtagctgggactgcaggtgcctgccaccatgcctgactgatttttgtattttttagtagagacagggtttcaccatgttgatcaggctggtctcaaactcctgacttca

SEQ ID NO: 911 - DNA, 326 bp, Homo sapiens; identical to SEQ ID NO: 910

SEQ ID NO: 912 - DNA, 142 bp, Homo sapiens
aagcatattttataaagtctctccaaacctgcttgttattgatgttgttaatacaatatttagattccattttgaacattccagctggcaaagattactgaatgtcagtctctcccaagaatgagttggtttttttttttct

SEQ ID NO: 913 - DNA, 142 bp, Homo sapiens; identical to SEQ ID NO: 912

SEQ ID NO: 914 - DNA, 259 bp, Homo sapiens
ctgggcagtgcgctcccatctgcaccttatggacagcgtggccagggtcgaggtccgagttcctggccgcgtcccaaggatcggattccgggtctatagttctcatggtggttcagagtgggctgaattgggattggagtctggaatccgcatcgtggttctgagtccgcgctattgggatggaagttgggaatccatgttgtggttttgagtcaaagcccgaattgggaccggagtcggaaatccacttagtggttct

SEQ ID NO: 915 - DNA, 259 bp, Homo sapiens; identical to SEQ ID NO: 914

SEQ ID NO: 916 - DNA, 495 bp, Homo sapiens
gcagtctgagttgggggtggtgatcacctgccaggtgagaggtagtggtagaagtctcttggtcatattggagatgagagttgatcagatgcaggtctcagtctgggtagtaggcttgaagggccaccactatgttcagatcccagtaccccactgtggtccctgagcaggtcaaatagccttttatataaaattgagagtaagagtgccttcccacagcactgttctggttatgaaagagaataattcatccaggtagaatagttctgtcttagattatcacaaagtataaaaactttcctgataatatccacatttgatgtgcatttaccagttctttctttactgtggtgccccttttgctagaccaaaagctcccaacgaggaactctgttttgttttctgctgcctgctcctgtacccagccaagagcctgatacacagccttactcagtcagtacttgaaggaaagcaggcaggcaggattaaccagat

SEQ ID NO: 917 - DNA, 493 bp, Homo sapiens
gcagtctgagttgggggtggtgatcacctgccaggtgagaggtagtggtagaagtctcttggtcatattggagatgagagttgatcagatgcagtctcagtctgggtagtaggcttgaagggccaccactatgttcagatcccagtaccccactgtggtccctgagcaggtcaaatagccttttatataaaattgagagtaagagtgccttcccacagcactgttctggttatgaaagagaataattcatccaggtagaatagttctgtcttagattatcacaaagtataaaaactttcctgataatatccacatttgatgtgcatttaccagttctttctttactgtggtgccccttttgctagaccaaaagctcccagcgaggaactctgttttgttttctgctgcctgctctgtacccagccaagagcctgatacacagccttactcagtcagtacttgaaggaaagcaggcaggcaggattaaccagat

SEQ ID NO: 918 - DNA, 273 bp, Homo sapiens
gatggcctcatcctgtgtcccagctctcattacccacactgaggtctccagcctgggctgcaaccctgaaccgcaggaccccacatccagcccctcctgactcatccacttggtgttgaatttgatgcaggccagtgcagccacattgaattctgcatttttccctcttcaaatctctccttcaaggctttctcatcctcccaggcccacggtcagtcttgtttctgtcctactcctccttgagtaagacctctcggctccacctcctaaact

SEQ ID NO: 919 - DNA, 273 bp, Homo sapiens; identical to SEQ ID NO: 918

SEQ ID NO: 920 - DNA, 299 bp, Homo sapiens
agtctcgctctgacacccaggctggagtgcagtggcaggatctcggctcactgcaagctctgcctccggggttcacaccattctcctgcctcagcctcccaagtagctgggactataggtgcccgccaccatgcctggctaattttttgtatttttagtagagacggggtttcactgtgttagccaggatggtcttgatctcctgacctcgtgatccacccgcctcggcctccaaaagtgctgggattacaggcgtgagccaccgcgcccggcctaatcttttaatttttttgtagaga

SEQ ID NO: 921 - DNA, 321 bp, Homo sapiens
tttttttttttctttgagacaaagtctcgctctgacacccaggctggagtgcagtggcaggatctcggctcactgcaagctctgcctccggggttcacaccattctcctgcctcagcctcccaagtagctgggactataggtgcccgccaccatgcctggctaattttttgtatttttagtagagacggggtttcactgtgttagccaggatggtcttgatctcctgacctcgtgatccacccgcctcggcctccaaaagtgctgggattacaggcgtgagccaccgcgcccggcctaatcttttaatttttttgtagaga

SEQ ID NO: 922 - DNA, 125 bp, Homo sapiens
taatcccagctacttgggaggctgaggcaggagaatcgcttgaacccaggaggtggaggttgcagtgagccaagactgcaccattgcactccagcctgggcaacaagagtgaaactccgtctcaa

SEQ ID NO: 923 - DNA, 125 bp, Homo sapiens; identical to SEQ ID NO: 922

SEQ ID NO: 924 - DNA, 220 bp, Homo sapiens
  SITE (51): n equals a,t,g, or c
  SITE (104): n equals a,t,g, or c
aaaagacattattcagaaagagccagttgggagagagcaggcaccagggtntgggtgttcttactctgggacacaggtttcaggcttttcggcttgaaggtggnggttttgccagggacccgcacctgtctgcctagaatttctctgcctcctattgctgtcattggcaacatgctgagaccctgtctctactagaagtacaaaaaaaaaaagcccagcg

SEQ ID NO: 925 - DNA, 345 bp, Homo sapiens
gggtctttataggcacaggatgggggtggagtgggctataggtagttttggaaaaggcaacattcaattggtaaaaagacattattcagaaagagccagttgggagagagcaggcacacagggttgggtgttcttactctgggacacaggtttcaggcttttcggcttgaaggtggggttttgccagggacccgcacctgtctgcctagaatttctctgcctcctattgctgtcattggcaacatgctgagaccctgtctctactagaagtacaaaaaaaaaaagcccagcgtggtggcgtgcaccagtggtcctagctgcttgggatgctgagatcagagggtt

SEQ ID NO: 926 - DNA, 192 bp, Homo sapiens
accccgtctctactaaaaatacaagaattagctgggtgtggtggcgtgcacctgtaatcccagctacttggaaggctgaggcgggagaatggcttgaacctgggagaccaggagttcaagaccgcagtgagccatgatcgcatcactgcactccagcctgagcaacagagcgagaccttttctcagaaagaa

SEQ ID NO: 927 - DNA, 644 bp, Homo sapiens
gtgctactggactccagcctgcatgacagagcaagaccccatctcttaaacaaaaatgctttttaaaacactgaggtcaggtgtggtggcccacacctgtaatcccaacaatttgggaggccaaggtgggtggtcgcttgagctcaggagttcgagaccagccttgctgatgtagtatattttcttgacccctttttgggacacgtgacagaggtgcctcatttacccagtccaccccactcaacccctcatgggagggagcgtacaagcgaactagtgcaggaactggggtgagcgagtggaggaaccggcctctttgctctggcaggagtgaaccctgtgcaggccccatggcagcatccaggtgtgggtgcctgtgaccctaaggcctcagagggtgtgttataatactcctttagctctgccatccacagatagcagtgtgttaccagctcagtgggccctttgcttcatcgtgtgaggcagctgccttctaccagtgagggcaaagggccaatgtgacagcatttttgggtactcacacctggtgtgtcctgaattcttgtctggtgctcaagaggaatgaggtcacatgggcgaattgaagaatggtgaatgtggagaattttactgagtgatgaaag

SEQ ID NO: 928 - DNA, 281 bp, Homo sapiens
catgtaaaccataaatacatatgtctactatgtacccacaaaattaaataaaaataaaaattatagtaattattctctagtatttcaactgctaccttacttgctatttctgtgctacctttcatagtagaattccttaagaattttctttacttgctatctgcagttcttttacttctatcatctctacttcagtcaaatattcctcccattttccaccaaaactgtccttgttagtgtcaccagcacccttcatgttgctaaatccagtggttaatttt

SEQ ID NO: 929 - DNA, 159 bp, Homo sapiens
ctgggtgtggtggtgcatgcctgtaatcctagctactcaggaggctgaggcaggagaatcacttgaacccaggaggcggaggttgtggtgagccaagatcgcgccattgcactccagcctgggcaacagagctagactctgtctcaaaaaaaaaaaaaa

SEQ ID NO: 930 - DNA, 226 bp, Homo sapiens
ccaaaccttgaaaccatagttaaacccaattgactgcctgtgccatgtcagcatctgtgcagctaaacatgtcttgagaaataccatggtgattgatctcatttgaaataaacctcaagagagcccttaatgctattgggcaattatactgtatttctgtatctccatcactttcctgttctcccaggaaatgatttaattccttctttcattacctcaaacctcc

SEQ ID NO: 931 - DNA, 474 bp, Homo sapiens
ggcctgttctctgaggttctccctgcaggaggatcataagaaaaaggaactgaactaatgatataagcgattttctaaaaatagccctgcacctctgccctagggaggaagggaaaggcccattcatctagctgcaccctgaagtagagcgatagccagtgacagagaaggaatacaaggataatgaagaggctcagggattacaataagaaccgtgtggccgggcgcggtggcttatgcctgtaatcccagcactttgggaggccaaggcgggtggatcacgaggtcaagagatcgagactatcctggccaacatggtgaaaccccttctcttctaaaaatacaaaaattagttcggtgtggtggtgggcacctgtagtcccagctactggggaggctgaggcagggaaatcgcttgcacccagtaggcggaggttgcagtgagccgagatcgccccactgcactccagcctg

SEQ ID NO: 932 - DNA, 474 bp, Homo sapiens; identical to SEQ ID NO: 931

SEQ ID NO: 933 - DNA, 474 bp, Homo sapiens; identical to SEQ ID NO: 931

SEQ ID NO: 934 - DNA, 124 bp, Homo sapiens
agatgaataattaaataattgtgcatatatatatatatatttacatgtggtcattaaaaattgtgttacccttctacatgctaacatgaaaacagttctgcaatatattaatttaaaaagaaaa

SEQ ID NO: 935 - DNA, 159 bp, Homo sapiens
tttttttttttttctttgagagaggctcttgctctattccccaggctggagtgcagtggcgtaatcacagcttgctgcattccctatctcctttcctgggctcaaacaatcctcttgcctcagcctctctagcatctgggaccacaggtgcgcaccacc

SEQ ID NO: 936 - DNA, 393 bp, Homo sapiens
ccatgttggccaggctggtctcaatctcctggtctcaagtgatctgcccacttcagcctcccaaaattctgggactgcaggtatgagccaccatgcccagcctaaagaggtatttaaaaagtcatttttgataagaaaatgtggaacattattttggtcttttaggtgtcttgaacatagtctacctaatcatctagacaggaagataattaacctctattttaacaaacatttttcttcttgaaatgaaatattcttttagataccaaaatgaattaaaattgagtgattactattaaagctgcaaaattatttgggagactgagatagaaggatcacttgagctcaggagttcgagaccagcctgggcaaccgtgaaactttgtctctact

SEQ ID NO: 937 - DNA, 4558 bp, Homo sapiens
gactaaagatgatcttctggatcatgtaccgccagagtctgtggatgttgttatgttgatatttgtgctgtcagctgttcatcctgataagatgcaccttgtcttacaaaacatttacaaggttagtgatttggggcctgcacttgagggttggacagtctggattcttttacttaccttccctcatgaggctcatgtactgtctagattcacatagtctctccattctcactaggtaggctgtgtagtgagtgtatagaaaggggtcctctggcataaaacatccaccctaaattctgatttgtgcagtgccatggctgctcttcagagcttcgccagccctgggacaaggatgattttgcagttacctgggatccatggagtcctgctataaggtgagaggagttatggtttagtggtcaagagtacacagtttggccaggtgtggtgtttcatgcctgtaatcccaacactttgggatgccaaggcaggtgaatcacttgaggtcaggagtttgaaaccagcctggccaacatagcaagaccttgtctaaaaaaagctaatgtatgatcattggcagatcacttaaccctgttgagtattggtttccgtgtctcatgtgagaataataatcacattcctttgtcccacagttgggtgaagatacaatgagaaaatgtatggttaagcagtcaaatgctaggcatgtatcagtcattagcaccgtgattgagctatacattgtggcacaatgaaatgagagctgaggctcagaatgaggaaaaccaacctgaatcagtaaagagccaaaacgacattctggttttttgtttgtttgtttgtttgtttttttaagagacagttgaatacagtttgagtactaggagatggtgaataaaatgttgcaagaaagtgcttcaatgaggataacactttcatttattgtctctaacacttatttatttatttttgagacagggtcttgctgtgtcactcaggctggagtgcagtggcatggacgtggctcactgcagcctcaacttcctgggctcaagcagttctcccacctcagcctctgaagtagttgggactacaggacgcactaccagatccagctaatttttaatttttgtgtagagatggggtctcactatattgcccaggttggtctctaacattttaatcctgtgacactggacattccagggtgctcttggaggtactcaagaattgtcttcagggacgagcgaggtggctcacgcctgtaatcccaactttgggagactgaggtgggcaaattacttgaggtcaggagttcgagactagcctggccaacatggtgaaacctcatctctactaaaatacaaaaattagccgggcatggtggcgggcacctataatcccagctactcgggaggctgagacacgagaatcacttgaacgtgggagacggaggttgcagtgagctgagattatgccactgcactccagcctgggcgacagagcaagactccatctcaaaaaaaaaaaaaaaagaagtgtcttagtgttatggagccctgcctggtcttactatctttttaagtagtaggccattttggttccgtattatgggcatttcagtctgtccccttagtaactatcacaaatttattttaagtcctaacttaatcaggttttattttgacagggttctccaaagtcatgttcagcctgcttttgtttcataggtattaaaaccaggcaaaagtgtcttgtttcgtgactacggactgtatgatcatgccatgcttaggtttaaagccagcagcaaacttggagaaaacttttatgttagacaagatgggaccagatcatatttttttactgatggtaagatgaatggaatccagtctttaaatgttttattctttgtttctgtttatttgattgcattatcactgcaaggctgcttggagaaggcttgcgacatgtgcacgagaccctgaaacaagccctctactgcacaatatttacccagcacctggaaggcacagacctggcccctgcccttgaagagctcacaagccttctctggtgtcagtgactcccctaatgagcttgggttaatggacagcctctgacatgccatgtggattccctactaggaattgtgctggaataagagggagggcaagtcagaaacttcttgtccagttaaaaataaagcaaatttgacagtataatgccttgagattactttcccatggcacaaagtcaggaaacctttttctgtagaattgattggatctgttttggggtttggtttttttgttgtttttgagacagagtctaattctgtcacccaggctggagtgcagtggtgtgatcttggctcactgcagcctccaccttccagactcaagtgatccaccgaagcctcctgagtagctgggaccacagacacatgccaccatggctggctaatttcttgtatttttggtagaatgggggtttcaccatattgcccatgctggtctcgaacttctgagctcaagtgatccatctgtctcagcctccaaaagtggtgggattacaggtgttagtcaccatgcctgtcctggatctgtttttaaataaatatgcaaatttgctgtaaagaggcatttatttatttttgagacagagtcttacaggctggagtgcagtggcatgatcttggctcactgcaacccccaccacccaggctcaagtgattctcatgcctcagcctcccaagtagcaaggattacaagtgtgtgccaccacacccaactaatttttgtatttttagtagagatgcggttttgccatgttggccaggctggtctcaatctcctggtctcaagtgatctgcccacttcagcctcccaaaattctgggactgcaggtatgagccaccatgcccagcctaaagaggtatttaaaaagtcatttttgataagaaaatgtggaacattattttggtcttttaggtgtcttgaacatagtctacctaatcatctagacaggaagataattaacctctattttaacaaacatttttcttcttgaaatgaaatattcttttagataccaaaatgaattaaaattgagtgattactattaaagctgcaaaattatttgggagactgagatagaaggatcacttgagctcaggagttcgagaccagcctgggcaaccgtgaaactttgtctctactaaaaataaaaaaaaaaaaatattagccaggagtggtggcatgcacttgtggtcctgctgcttaggaggctgaggcaagaggatcatttggccccagaagatggaggctgcagtgagctatgatcataccactgccctccagcctgggcgacagggcgagaagcctatctcaaaaaaacaaaacaaaacaaaacaaaatgcaaaattatcaaaataggttaaaattcaaaagatgttttaattcataaaatttaaaccaattgtaaatattgagaagattcagtgatatctgcagagtgcttcagagcacgttctctggagcaatgctcttagtacgagtctttatttttgctgcctcaccatttattctgtttgtttcatttaatgtgtagtgatgtattatttgggttagattttcctggagctaggtcaccactgggtgtttttctccactctgatcacaaattttcctccttcgtgttaggatgaataagatgtttgatgtaaacaaattgagcacatgcagaccttgtaggagtatagccaatttttatgtttttgttcggagatgggaaacaataagataatttttaaaaaggaatataatcggccgggcccagtggctcatgcgtgttatctcagcactttgggaggccaagattgggggatcatttgaggtcaggggtttgagaccagcctggccaacatggcgaaaccctgtctctactaaaaatacaaaaaaattaaccaggcatggtagtgtgtgcctgtagtcccagctacttaagaggctgaggcaggagaatcacttaagcccaggaatcggaggttgcagtgagccgagatcgtgctcctgatctagcctgggtgacagagtgacattgtgtctcaaaaaaaaatttttttttaattaaaaaaaaaaaggaatataaccaatttggaattgtttctttttactcgggcttttgtatttgagaattcataataaggcaagatgcgaacaccaggttgtccttcaccttgttctgatttaattgtttaattggaggtttctgtttgggtagaagaggagaaggagtgtattagttcccaaatcaaaacctttaaattttagcattgaggttttcatttaaaaaaatattaaaatagcctcagccctctatccctcctcaaggactgcaaagcaaatgtaatgttatgaagactgttgagcattgttgatgcttgtcttacagacttcctggctcagctctttatggacacaggttatgaagaagtggtaaacgagtatgtgtttcgagagacggtgaataaaaaagaaggcctgtgtgtgccaag

SEQ ID NO: 938 - DNA, 646 bp, Homo sapiens
ggagcagtatgaagaagaggtgagaacgacccccggaccgaccaaagcccgtgcgccgctgtgtcccgcgtccagcacctacgtcccgccgccgtcgccatcgccgcggccaccatgcccaagagaaaggctgaaggagatgctaaaggagataaagccaaggtgaaggacgaaccgcagagaagatccgctaggttgtctgctaaacctgctcctccaaagccagagcccaagcctaaaaaggcctctgcaaagaagggagagaaggtacccaaagggaaaaagggaaaggctgatgctggcaaggaggggaataaccctgcagaaaatggagatgccaaaacagaccagtcacagaaagctgaaggtgctggagatgccaagtgaagtgtgtgcatttttgatagctgtgtacttctggtgactgtacagtttgaaatacaatttttttttttttttttttgagacggagtctcgctctgtcgcccaggctggagtgcagtggcgcgatctcggctcactgcaagctccgcctcccgggttcacgccattctcctgcctcagcctccggagtagctgggaccacaggcgcccgccaccatgcccggctaatttcttgtatttttagtagcatggggttttcacc

SEQ ID NO: 939 - DNA, 1131 bp, Homo sapiens
aaaatcactctttcgtctgggtgcggtggctcatgcctgtaatcccagcacttcgggaggccgaggttgggggatcatctgaggtcaggagtttgagaccagcctggccaacatggtgagaccccatctctactaaaaatacaaaaaaattagctgggcatagtggcgagtgcctgtaatcccagctactcaggaggctgaggcaagagaatcgcttgaacccaagaggcggagactgcagtgagccaagatcatgccattgcactccagcctgggcgacagagtgagaccctgtttcataaataaataaaatcactctttttactttatatattttttgagacaggatcttgtggtacgcaggctggagtgcagtggtgtgtgatcacagctcattgtagcctcgacctcccctgggctcaagcagtcttcctgcctcagcctcctgagtagctaggactacaggtgtaagccaccatgcctggcccttaattttttttaatgagcatgtacagtagtcccgctttatccatggtttcacttaccacaatttcaattacctgttttcaactgcagtcagttacttttcttaagatattttgagggttataggctcatgcctataaccccagcactttgagaggccaaggccagcagatcccttgagcccaggagttcaagaccagtgtgggcaacatggtgaaactctgtctctacagaaaatacaaaaattagccaaatgtggtggcatgtgcctgtagtcccagctggggtgggaggttagcttgagcctggaaggtggaggttgcagtaagtcgagatcacgctactgcactccagcctgggcgacagagcaaaagtctgtctcaaaaaaaacaaaaaaaatttgaaagatcacattcacataacttttattacggtatattgttaaagttgttcttttttttttagagtttggtaccatcttggtttcaggcaaccactgggggtcttgaaacataccacccgcagatacggggggctactatgtactttttgtattaaaaaataggaagtgtatgtgtgtgtgttagagacatgtaaataaaatttcaaggcctgaaaagtagtcaaagttttatagaataacat

SEQ ID NO: 940 - DNA, 23626 bp, Homo sapiens
cccggcgctaagaggcggggtttccttgcgccgcgcgcaaggctggggcaaaacccgggccgggatagggcgtggggccgcgcgtctggacgtccctcgcgtcgggcccgacagcgcctgcgcactgcgccgccggctggggtgctgggggcggggcaggggcaggtgtagcctctgtgcctcgttgtcccctggcgctacccggacatctctcagggtgccggcaccatgaagatctggacttcggagcacgtctttgagtaagtttggggcgcgggtcggctccgtggagggcaggcacgccggccctggagtagaggcgaggcagaggcggcccgcaggaggcttctaggcgtcgggcctagcgaggggagcgaactctgaagcctgcgggccccggcgacacggagggcagaccaaggtcacgaccccgaggcgccctagccgaggggacggctccgacctccagacccaggcggccttgcgaccggcagggctacggggtcacttccgggctgtcccccaccatgaggtagcctcgggccggcggcctcctgaggtcctgggggcgtcgcggagcacgaagcccttgacagcactcagggttgccccatcccgccctgtgaaaccactttgggacgtggacccgaggatcccaagagggaggtgttggttttctccagagtgtactttccctggccgccgtttgggtggagtttctaccttcgaatgtgaatttcgggtgaactctgaccaccaggatgtgaagccttttcacaactcgttcatctacgcagcagagccttggatttggaattcaaggtctagctctggctgtaacaagcgtgtgaccctgggttacccattttcatctgagagatggaaaaggacgatcgtcagggcctacccgtgttagctctttgaggccacgttcaggaacatctttttggataatgtgaactgtttactaacgaaactaagccttgaaccagttggatgtggagaattatattctcttctaggtccctgattccatttacaaaagagccacaaatttaagcagcgaaatccttttttttcccgagttacctgctctgttccgctgatcttaatgtcgttgccacactgttttaattagtatagccttgtaaataaatatgctacaaagccatttatgtttttaaaactgtctctgaaggcaaattttttttaaatttcttttttgaggcagagtctcgctctgttgcccaggctggagagtagtggcgtgttcttggctcactgcaacctccgtctcccgtgttcaaacgattctcctgccttggcctcccaagtagctgggattacaggcgcccaccaccgcgcccggctaatttttgtatttttagtagagacggagtttcaccatgttggtcaggttggtctcaaagtgattcgccctggtcaggtcgcacctgacctcaggtgattcgcccgccttggcctcccaaagtgccgggattacaggtgtgggccactgtgcccggcctctgaaggcaacttttaaaacgttgtccgcatttgtactcagtgggacacatcctagggcctgctgtatcctgcaaagtatagaatactggaatcagaaggaagctttcttttccccctactgtttagtctttttgggaggaaaaagacccgaaatttgtggtcatttagatgttcattaacctggtcgcattcatcactagtccatttcagctccgaggatgtttaatttcagtcctcttccaggtttgcatgcttcagtcctcttctgggtttgcatgcttcagaggttctcggcactcagtctccctagaactgtcttctcccatatcttccctaactcttcttcctggctcatcccctccttccctctacactctttctgcctttgtcttcagcgcttccctgtcttttcccattcagtgtaaatgttcagtgagattctgtgttggccttcctatattggattttacctgtgatcttaatttcttttttgtttctcttttcgtcacagactttttttttgtcctgggagaagcagccctgatccgtgctttctccccacataatctgagctgtttggtcaaagtcccaaatgataggtatacatttatggcacccagatctgtaccttgagctccagcctctcttgagctccgcttttcattttcaggtgcctgttaggcattgctaccctcgtgtcccacaggcccttaaaactcagcctgtctgaaattgaagtcatcatctcccctgacaaatctgagcgttgtttctgatctttaggatgtcactctctaacaatgtctaagtcatcattctacatcttatctgtctttgattttccaacacttttcttctgaggcctatagttggcatccaggtgaagtcattcattgattccttcaacttatagagatgcccagtatgtgtcagccactgttctttggattgattacattttcataagtaaatcaagacctcgatgctgcgccagtggagttaataatgtcctcacctcgtttcaaaggtgaagaagttggaccggtcagtgagccatagccaggtcctcctgattctactttggcgtggtctttgaatgtcttccattgtgagatcttttccacgtaattatgttaatacagctcagattaattgctggaagattaatcataataagtattgtttgtaatgtttgagctggttatggttcataaagcaatcttgagccaagctaagtcaacatcagtggtttcaagttggttcagaaaggagagatggactaaattacaaataatgcataaccaccctgaagtcatgcgattattaattttttagagagggttgggggaagaggtaagggcatggaagccagctaaccatggcatatgactggatggagacctggggagggttcatctgattttcattttagagagttgccttggtaagaatcagtgcttggcctgtatgcttcgatttgtcgggacacttcagattgatgaagcaactctgcttatatacctgcattgattgctggataaggctggagactaaagacagaatgaggttcattggtacaatattgtatagaaaagaatattataatgaaaacattaaaaatgatgtcactggttgtccagggttctgggaaattaatggagttgagattttccttttgtcaacgagatgtagttgtcaatctgagttctctaaaaggttggaataatgtctacttgttttacttttagaaaaataaaaagtaatgctgtgtggcttaacagtcattgtggcttgaacatcatccccagatcttgtctttttcctttaaatgaagatgagagcacagataagtagtgtagaaagcatccgaatcagactgcaggtggactaagtcacctttaatactgattgtacttaataaggggtccttttgaaaatgatattttttgtacaagtgtcttattcacagaagttgtgaagtgaacaaaggttgcatcacattttgaatcatccaagcacatgtgcctttttgaagaaaataaagatactgcaagttctcaagtgatgtgatattattaccacttcaatactaggtgataagcaagtgcttattatattaaaagagaatattagaaaatagtatattaggagtgcaccttaaggacattttattatattgagtgaccttttcaaaacagaaatcagaatcactcttttgagaaaaacagtagataaagattgactggaggagccattgttatgtattacattaaaatgaagggaaagttcaataattaaatcaatgctttggatctttttgtgatccctgtaagaatttatagtgcccataaactcttttacttttgttacttccgtataaactgatagaattggggtcagaaaaaataataaatggcataatgatacttttggctatttgtttcagtagaacataatttttaaatacattttcatgaatcactggttcttcctagaaacaatttacatgtgaaagtggataaggataagtaggaaagatggtgtagactgctttgatctttatagatatgagtttttttacatagcctgtattgtggaaaaatactgaagcctgttaaaaatgtagatcagtttcccataatcatcagtgtttcagaaggtaatttttcctaggtaaactcattaaacttacattgtaatgaatgatttgatagattataaaaattgtttaactcatatgcataattttaaatgtctgaattttttttttttttttttggttcacatcggcagccacccgtgggaaactgttacaacagctgcaatgcagaaatacccaaaccctatgaacccaagtgtggttggagttgatgtgttggacagacatatagatccctctggaaagttgcacagccacagacttctcagcacagagtggggactgccttccattgtgaagtctgtaagtgtgtctttattcccggagaaatgtgactgctgtagagaagttttctaaaccgcattatactttcaaataggttgtgggagccgattctgaatgtcattttttgcatccgttcaagttgtattataataaacttgaattatgggtgtataatgaattggaaatattattacagtcttcatgaaggcacccaataaaattttcttaaggaagccagctaatgccgtgtgatctgaaaggagttctattctgctttttctgcttttgccagcaacttgagaccaatactaaggtttggcagtaatggtctggtcataattgttaggtgacagttctgtggtcagtggtgggttgtgtacattaagtaaggactatgttctcggacttgttattgccacatttgttccaaggtctggaactccttcctgtacatttagaaacaattctattcccttaagaatgagcaggctttagtgagcagattttaccaggaagaaactaaaatgccagtttaccataatgcgagaaaactggtataataagtggatccaggtttctttagagggtctctttatggagagtaggttcactaagaaaactaaagtacacattttcaataggaatgtacttactgcctccttatgcaaaccatagtgcagacacagaaatgagcagggtcagggggtgggcttggggtcatagcacagggagtgacagtggacactgacgtgtgagcctccatcgtaagaacgctgtttttctgtctggagaatgaagctgaggtgccccctcccttgggctgttctaggaagatactgacagatgcctttgagttctcctttttctagctgccatgttgccccaaacctgatttccatatctcagcctcagcgctccaccgtcgcaccgcggcagattcagcgtgctgcctcacgttgcagacgttctcagtgggctggtttctaattgcctccgggaaaagtttttgtgtctggcagtctcctctcatccatgatatgtgaataggcctcctttctgacctttgcttgtttcctctggtttttagaaaacagatttttggttcaaaatattgtaacacattttttccttcaaataaaatattgatacacttggtaagaaattcttcctcctctgattcctagttctgaatgttttacttagcttattggtgcagcaagaacgaaaacatatgtgcaagaacattctgtagttgatcctgtagagaaaacaatggaacttaaatctactaatgtaagtcttggctcccttttgtttcatttcgaactgtctggctgagttctttgtccctctcctagttgccgtagaagtgagtgcgtgttcatgatgtggttcagagaatccctgcttatgtgctggcctaacttggccctggatgttgcttccttacccttcctgctctcatgatcttgcctatctctaaggggatagcactcaataaaatgagtttgggattatgtgtattatcattattatactttatttcctcaactttgctttttaaataaaaagtaggcagtgaatagtttatgcaataatagcagcggtttatttgttgttttgtatgtttagtaagattttggcttgtgtgttgattttagcaacattttgaatcttcagttccaaaatgatttgatcttttttttttttcttcattctgtagatttcatttacaaacatggtttcagtagatgagagacttatatacaaaccacatcctcaggatccagaaaagtgagtaaaaaatattttaacaaatgtatcgtaaagggtgtttaaggtttttttatcaagttttttgaaaatgaaagctgggtcatctgaacctgtgtgaatatgttttgttccagaactgttttgacacaagaagccataattaccgtgaaaggagttagcctcagcagttaccttgaaggactgatggcaagtacgatatcctcaaatgctagtaaagtaagtgaggctgcttcttggttattattccctggttcatttcctgggaatggaatggggtgctgactgcatgtgtgtccttgtaagctgacccttgcccattctaccataggaaactgcagcacgttgggcagttacttacaaaggctctgggttcacatccaagctctaacttttagccttttaaccttgggcaactaagttaacctttctatgcctcagtttcccgtttttaaagtggagattacccgttttacagggttggcgtggagtgaatgagataacatatggaaagtgtgtagcctgaggcccagcactgaggaagtgctcgatgatgtgtagctgcgtgtcatttaaggcactgtttctcaaccttttttcactgttgtctcccccacaactcgttttagacattttttccctaattgccacctccattaagtcatatatcatatacatatgtgtgggctttatacataaaagagggagattttttccatccccccaagaaccaatttttgcttattgagaatgcatgatctgaaacagtaagtttagagaaagatgccatgcactgttacataacacatggtgaatgtggttatcaagagatactcatggatgccttctctgtgccatgcagagtgctaggctagacagggtatacagcagggagcaaaacaaatgtggtccctgcccccgtggaactaagaggcaggtgacattaatcatacagcatgtaattaggaaagaaaaggtacagaaaggtatgagagtgcttattgagtgttcagtaactgatgtttctgctgactgccaaatgggggcaggtggattgcgaggggtattccaagaagagtgttctaggtggaggagctgcgtgtgcaaaggccctgagacaggaagtagggaatgctctgtttttcaaggaactatatagaacactaggagagaaggggtgaggagtgagttgaggaccagatcctgcaggaccttgcacaggattttggtttaaaatgtaaagaaaagggatttgaccttcttgcccctaaaaaggggaccactataatcatgaaacaaataagacattctgtcatttaattgtagattcatttgagaacatcttttgcatacaaagtaaaagtcagtttatggatcaagccagttgctcaaggcatttgatgtttgctaaataacattagaaaaagccaggacaaaaacgatctgtcatcctgagattgagttaaacttgtcacgccccttgttacttcctggtgtgtcattagttcgatatatgcctttgctctccctcagtaacaataaatgtattggattttttttaagggccgagaagcaatggaatgggtaatacataaattaaatgctgagattgaagaactgacagcctcagcaagaggaaccataaggactccaatggcagcagcagcgtttgcagagaagtgatcttgacagttggtagacaacatcgggtactccaggtctctccaaactgactatatatttatttgttattttaaaaatacaactatattttgggtagttttttttttttttttgataagttggtgtaaggctatgtgacttgatcaaaacagatgcagggcctctaaataaaagggatcatctgaaattaatgttgtttgaaattactatctgattttgagggttccagtatttctgtgaaaattcaacaagaactccttggaaactggtattgatattcagtctccttaaggtagatttttcaagcttttcatacattggaactccacctgactttggaccaaccccagaacagagcagagccacctcctatagacgcccattgccctgctgctgtacacttcagcagcttgcacaagggagctcacttaaaaggagaaattgtgtagttttaaaatatattttgtgtaaaataccttactatgctataaaccaccattaaaaaccagtgttttgatttggtacttaaatatttttggagtgaaaattatcactaaagtaacatgactccaacaaaagtatggtttcattataaaagagtactgtattgatttgcccaagttttgtaacttagtaaaggtattaacttccttggatttgtactttgtgatttagtatgctgtatcgtgggctggttatgttaactgaaaaaaataaagtcattacctgagttttgcagtgctctaacttaaacagaagaacagctgttcacatcttttagcattttacatttgcctaacttaaaaattgccatgtgtcaaaatcatggttttgtaattgctaaggcatgatatgtcaggttatttgaatataattactttttgaagtaattgtgaccacaaaacatcttttttacatgaaggagctgtgtatcatttgaaattactcaaatgatgtcttgctctgaggcataaatcccaggtacttagtgtttttaataatacggtgccactgcaggatttgggggcggtggggaagaacaagcataatggtagggggaggcttggcctgaaactaaccactgagtgaattgcactgcaggttttacttaacgggaattccttatttgggatgtcaagagggcagctgcaaactgaaaaacaatccagtaaatgtactttgttttatgtattgtagcaggcaattaactactaaataatagctttgacatttgcaattgttgcatagagactatttttgctagaagatgattagctcttgcctttattttacagtgcttagtgtgataaacttctagtcatgtttcctatccaagagaccagttaatatatgtacataaaccacagaaatagtataacacactatttttaaattatcgttttcctacttaaattttgtttagcttaagacttcttaggacatttgtaaaagcaggttaaatttaataaggtttctgatttttttttgtaaccggagatagtttttacaagtgaaataacatttcagctaaataaaacatcgctaaataattgatatttgatgaaaatctgctttgtataatttctgtaaattatccttgttctgaaaaaggtgtaatgccctaatatttttaaatccttatccttttttaaaaactgacctattgataaaactataaattttcattttccagtgcagttagttacctttttaaacataaatgcacaacaagcaaatgaatttaagagaactaaactggaataagtgttcataaatgaaacccttggactatttaataaagttgaaatgtgaattaaggaaaacttttgttaataaaaactttcttttaagtgatgtttttcctgattataatttctttttagtaattaaaggtgaagggcaaaggcttttttttctttatgagagaaacactttaattcctagactgtgagccttcactgcgttgggttagtttctctaaatcacaggctctgagatgagcattttcccggccgcctggcagttccctgtgcctccagtgggttttcctcacatttttcttcccatccattccgggcaacagtgacaactgttgccttacccttcgtcttgtcgcacatcggaagcaggtcctagaactacagaaaacgctagggggtcctccactgggtttccagggtttagtgtcactccgagaaagggggtgccctaagagcctttctaaatctcagctctcaggacacgcttgtctgtccacagatttaaaaaagccggcgccgtttccctgaagcgggcgcaaagccaggccctcggggcggccgtgcccgcgccgcctcgcgtcctcgcttcccgaaagcacgcggctcagtggtccttagcgagcggggacaccccggccttcttgccccggtcgtccccgccggggtaatacggaaggtcgggggacacacgccccgggagctcttggagccaataggtgggcgcggccggccggcccgccccgggattggcacccgcagtccagaccgcgcgcgcccattggctcccggcgccggggggcttccgcggcagggcagcaggggccgtgctcaggggcggggccgggtaggaggcggtgattggcaggtccgcacgccccgcctcttccgcttctgtggtctgatcttcctgcggctgaaccgcccggctgagccgacattgccggcgtcttggcgattcggcccgacgagctccgctttcgctacagcatggtggcctactggagacaggctggactcaggtaggcccaggcctccagagggaagggcttcgcgagccggcccgcgcgcatcccggtgcccagaggtcatgcaggacacagagcagcggccccacgcgtgaccggggttgggccaagcctcgggcgtcgccgccaagatggcgtcgctgtgggcaaagcgctcaggcgggcgcggcctcgacctcgcgtgggagcgcgtctgtgtcctgcctcgcttcccgacggtgcggcccagcacccacagagtgcccctggacacctttgtgaatggcaggtttctcgagagagaggccagctcttattcagcaaacctttttcttctagaatggtgctggagccaggtggtgaaagtagtacagtcacatccacctcgggaaacaggagatttctctccacgtgaccgccgttagcagctttgacctttaatccagcatcgaggtggagccttttacaactttacacattttttttttaaacttttaagtcctgttgatttcaggtttccttatgtctaaaaggggtgaaagccataactgtcgagagcccctcacaaagatgagaggtggctcctggaaagctcaaatatggaacccacttgaggacatggtgtctcatagtggaaccgcaaaccattggtctagctgtcacatccgatttttttttacccgtgcacctgagtgagcagaagtaccttgctctaggtgacacaccttgttagttgactggatggtgtagcactttacattttgtgggtacactacagcggagcttcccgacttgctgaggtcaagccagcgaagtcttgtagaattggaaggatggaaggatgatagtcccagtagtagataccgtttattaggcaacctaccctgtgatccatactttttcacacttgtttttcctcctcccagctatcagcaggacaggtattattgtccttttattctgttgtttttttcaggtgagtgagtaaacgtgctgaaaaggttgaacagcctgaaggtcacccagttagtaagaatggaagcaggcattggaactcatacctctgagtccccaaaataaattctaaaacatgagaaaatagcacccctccccgcttcctgtttttcaaaagtgggaaaggtgatctgacatcttttggaaactacagtgttgatgggagtccatctaccaaacaggaagcaggttttacagttttgctagaattgatgatgttctctaagcacttttcagtttgatttagaaatcttcattaggaggttattttcagtggcagacttgtgagacagaattcagtattctcagagaagagtttaaataatttagaacgaattgttttaattcaaaatagttttctcttatgtatacctcattttccaagaataatataattaaagttttaaggagagaaatcgaggagagaattcatgattcatgttatagtctctaaacatttcagtctctttttttctatgctgtgggatttttaaaaacatttatgcatctttcattttgaattaatatacactaaagagaaaacacagtacaaagaagaaaaatcaaagatcatccatccaaacaccagttaatactttggtacatttttttctagttctttttctttgtatagatactttttggcattagtcatatttttaaatccaattctacaataaggtacaaccaaaccaaaataaaaagtacaggaagaaaagcgaaaacacagtaacagctgtctggctggaatattgataattaaccatataccttctctcattttctcccagctacatccgatactcccagatctgtgcaaaagcagtgagagatgcactgaagacagaattcaaagcaaatgctgagaagacttctggcagcaacgtaaaaattgtgaaagtaaagaaggaataatctgtaagttatggatttatttagaagaacagttgcatcttaagtttttggagcaccataaagatcaaaataattttagttttgggttctattcattttttagtcagtgtatttggaagttagttattgggatggtataatttaaagcatgcaggttatagaagtcccctggcctaataaaaagaaagtcttcttgggccctgacaagcagaagtaattggcacattgattttcagttcatttagcaatgcttaggtagagagccatcgtatttgaattaaacctgtttcatttgtctgcacaaatcaaataatttggaggatgaactccccacttgtataattgcaattggagttacataacagtccaagagcatgaaaaactacagttctttacatttttatttcccccacaaccactaatgttctcacaaatcactacttcccgaacataataactacaggcacaggcaagggtcctgctgttgtatcaagcaataaaatctgcaagaccccgcagcgaatactgttttgctaatttattatgctttcagagggtttggttcattttacttttccaaagatgttggtgatgtaaagttaaattctcgtgaaataaaaaggtctgtacagttgataagtgtagacttttgtgttccacattataaaagtggtttgatctctaaagtactttcttgacattgttatttcaaaagtaggcaaggcaaattatcagagagatgtttttcagatttaatttttcttgttttgcttttaaaaagcttcagacccataatagcacagaaatgtgataaatattaatcctttggcagcttatggttatgagcaattttacttattggaactgtctcccctaagcacttttcattttcattttgaattagtaaatattttattacaagtctggagatgcagtgttttgaatttagccctttttctaggggctctctgtctaatctcataattctgagtaatgagacctggttttatgttgggtggttttgttttaacagtaagctaacagaaaatcatttagcctcactcggctcagagctgccagactgcatctaatgctgagattttgcaaagtcctgggggtcaggaagtagtgtccgatccccttaaacaaagcattagcccctctctgttatgcccttcagggttacagaccccacctcattagcacaaggagatgttagtgtcttttaaaggcaaagtagtttctttattctgggagagtgtttacttttactcagcaggaaaatgcctgcttgactaagcctgtgtacttgaaccagcactttttacatctgagccacggcaatgtgaatgatagccacagttatacagttcactataaggaagttatttcttatattcatgttgagtttttaagaaaacacagagaactagccagcaacttgcattttctttttcctcctagaccctgactaaagcttgaaatgctacatttccaaggtgaagatgtgtgggcacatgttatggcagattgaaaaggatctcattccatgggaaaaaaaaaaatcctgtcttgttcataaattgacaatgtcaataaattgaaatatggttcactgttactcttgattttagtttgtgagactttttcattttctttaaaggaactgtctgcacagctgcatgattatggccatgtgaaccagggtttcttaaaagcaggggaagccagatttaatatttagtgaccaaagggatacagaaagcattttgaaaatgtctcaaaatagttgtttcatgacattaattggtgatcaaaattatctgctgtcattgaggcttcgtagtcccttatttttgaattgttgtcatgtcagaataatgacatggttatcagtaacaaatggaaataattattaaatactaaaagtgtagattagaagaagaaatactaaattgtacttgttttgtattgtgcacttaaagcctatagataagaacggttacagaatttaagcacaaagtgtttttcacattgttttgtaaatgaatctttatactctggtagcatttctcataggaaatgaggcaaagctattgaataacttgctcattgagttgatggccaaactgaaattaaaacctaggagttttgactgcaagtctgggacacggtgaccacaacagcagtttcgtggtatttccatagtgattcattcattcattatttagggatgaaaaattgttgcaagttatgtttttatctttctttgaaacttgaaagggcttgggcaagtaaaacaccattgcaaagttaactgcctgattttaactgtttttggagactggagaaataaatttgaactggaaattttgaaacaccattctaggatcagttctcacatggtacttaagctcacaatgatttatcagggccactgtcagcaatgccgaggataagccgaaaagaacatctttgttctcggcttctgggaatgacttattgtcccgacacttgacctgtaggttttactgaattctcagcacagagcgagcagggaggcagagccgattgagtggaagagggtgcctctggaaaacagcaggttaggagcccttggagtcctccgcctcggagctgtcatcctgctgttggcaagttagggcacctcagttcagtgctgtggcccccaagattaaggtactaggaagtatcctccattacagggaacaggaataaatgaatcaaaaagctatcgggcctttttgacatgggacgaataaagtaactaataggcaaaggggctaaatgatttccagtcaagtaattagagataagtcatttattaaggaggcagatggggtattattggtatatagatggcatagtagattgctagtatattggtagattattggtatatagatggtatgttaaggaggcagatggggtattactggtatatagatggtatggtagattggtagtatattggcagattattggtatatggtatgttgaggcagatggggtattactggtatatagatggcatagtagattggtagtatattggtagattattggtatagagatggtatattattaaggaggcagatggggtaattagaggtgagacttagggacagggcttgtgatatggaaaggagtgaagtcactgagtaaaagacaagtttactgtcagcagagattcttagaggctcttttctccgtgattaaaaaaaaatcctaaaccagtagtataataaacttcctgcctccagcagtgctgggtagctggcaggatgactgtgcccagtgatgaggtgaccccagtcagaccaacttaatgagtatcccactaactagttggatgatgtttgaagctgtcagttaatctcttagttcacatcgttcttgtgagcaaagtgaaggaatcggataagctctaaatttcggtgatgctgctgctctgagagaccaaggtcgctggagcaaccgtactgctaaaggataagctcttcaaaatcaaaagggacagatttcttaagtttctagtttgttttgtgtttttacatctatttctaccatacgaaagagtaggatggtgagatgcatttctaaatatttttaactactcagtctggatggttaggcttcaagaaaaggaatttatttagtctgaaataaagcaattttgccatttaaaattgaattactttgtagtttaatgattactattgagcaaacaaatctttacagtaatataagtcagcaaaagttttttaaaaggtttaaatccctccttccttacatctatttcattgcttttttaggtttgggaagtaaagcaccagaggaagcatgtgtaaatccttgtataatcgcaggctgtaagtctttagcatctcaggaagttactaacttcaaactaagtatataggtagagtttcttactaaatctagtgcttcttgaaccacaagtagaaagcatttaaaacatgaatgttgttttgtgttttttgaagtttgtaaatagaagacttgttgatgatccgatggcaaggtatttttctcttggtatgtattttagttatttcctcgtgatgcataagtgaaaagagtgaagtttctcagaatgagcaactgtcatccatctacctgctattttattattgctgattacaaaagcaaatcaagagatgagaacccagttgcctgcaagtaaatatttactgcattgagggtcggagcattttcccattaccggttatccatggatcaaatagtgtatctcagtggtaattctagagggccattaaaaccctgatggtgctggaagagatggcagtgctgcatgtcagaaataggtaaactgtaattaagaagttacagatgatttgattacgctcttgtgtatttggtcctgttataatgtgagcagattaaaatcatgtagtgcttaaagctatgtcattatgcaaacatttatggcaacttctgcaaattaatttgaactgtaaaagttccctaatgagacgatgtcctccataactgagaaggacactgcagccattgctgcttaattcctgcatttgaatggttgccgagcgcatggtgtgccctttctcaaagagcagagaggctgcagagcattttggggggtgatgactgaatgaaagtgaaaagaccatttcaaaatagcctttaaaaggaaagccaaggatgattattaatgaattcctgggatctaacagtagtaagaaatttaaactatataaacatatatgttaaaggctagctcttcagaaataaagatcagaagactgcagttctttagttttgcttgtctttttgtttttcttgtttggaccaggtatttttgtggagaggactgtggcttttcttttttcctcttttccagttagcatgttgtatgcacaggtctacacaacatggatatttctagtggatgttgactcacattgaccttggctctgtagctccccatgtactagtcaggcacctggctcttctggaggctggcaggcactggaaagcaggatgccagtcagtgtttgctcagaggaaagaacctaaggaaagagtcttagtagccctcggataccaagtgaggattccagggtgcctatcagtgctgctaaagtataaaaatgtaacaccaactccagtggctccctgcaaatccacacgtgtagtctggatgcctggcaaacactttgaaacaaagggagcactttacaataaatttgctatttttttaagttaataagtatgcactgaacatcaaactcttcaaggttagtagatgtcagcaaagaccctaatgcctgtcagctgctccccacctgtctccctcagtccctgtgtcgaagctaatggtgagtgcatatcattcactgtgctgcagtgcagagtgggttttggagtgctgcaggagaaacactcatctaatgagaaactgttctgtaagcgactccgcggcacagcttctctcacagttaatgtcccttatcttctggctccatttctgcctcctccgtgacctcttcatcttcctctagaactgctttggcatcttgaaattgttggtactcggataccaaatcatggatgttattttcagcttccccaaattcgtttatgtccatcccttcgctggtgtaccagtgcacaaaagctttccttttgaacatggctgagaaatgctcagagaccctattaaagatctcttggatggccgtgttgttgccaatgaaggtggcggccatgctcagcccccggggcgggatgtcgcagacagccaccttgacgttgttgggaatccactccacaaagcagctgctgttcctggtctgcacggagagcagttgctggtccacttccttggtggacatcttgccccggaaaatgcaggccactgtgaggtagcggccacggcggaggtcacaggcagccatggtattgcgggcatcgaacatctgctgggtgagctcggccacggagagggctcggtactgctggctgccctgggccgtgagtggggcaaagccgggcataaagaagtgcaggcgggggaaggggaccatgttcaccgccagcttgcgcaggtctgcgttgagctgacccgggaaccggagggaggtggttatgccgctcatggtcaaggacactaggtggttgagatccccataggtgggtgtcgtcagcttcagggtacggaagcagatgtcatagagggcctcattgtcaatgcagaaacaggcatctgcattctcaatcagctggtggatagacagaaccgcgttgtagggctccaccaccgtgtccgacaccttgggagaaggcatgacgctgaaggaattcatgatccggtccgggtactcctctctaatcttgttcatgagcagagtgcccatcccggagcctgtgcccccgcccagggagtggacgatctggaagccctgcaggcagtcacagctctcactctcgtgcctcaccacctctaggacattctcgatcagctcggctccctccgtgtagtggcctttggcccagttgttgccagccccagagttacctgtggccaaaaagagaaaccagcaggggaagaaaggtgaaaagagaagggcaccagtaaagcatccccccctcctcctggtggaaccttctggaaaaacataccatggacaaaactgtcgggttgaaagagagctcctaatttgctagatcgaatgctgtccatcgtcccaggttctaggtccaccaagactgctcggggcacatatttcctacctgtgtagaaaaataggaaaaagtcagcctacttgtttttctaaaagttaatgttttatcaaaatagaactttgtgatactggtccaaaaaaaatcatggatattctagaaaggggcccttggtaggtcgagatttgagtatctaacatcatattttttaccccaacaacaatcccacaaatctatagaatacccagaaacaatctccatcagtctgctctgtgatattgccagtgacagagattctcttccttcatattggaaatgatcctggtttcatttgtgaaaccacaaaggaaagtgagtacttaacctgcttgtgttaaggtgtgtgccatatccagcagctccttccccattcctgcgtcttgaccagggcttggggacccaccactctaggatcctgctgccctgcctgtcgcctccctgagcatagacatcactgctttgacatttccatctcctgggcctctgcccttcctctgcttgtgttcccagttgcgggaccactgctcccagagccccgccagtcctaccgtaggcttcgttgtagtacacgctgattctctccagctgcaaggccgaggccccgcggtcgctcccagccaagtcgatcccgtgttcctcaccaatcatctcccagaactgaaagcaggaggaaggtcagagtaaacggaccccgaaaaaggctgtgttaaccacagagaaagttagcattcccaagcctgtttccctctggttgcctgaccctccccaagacattcttttagggccttttcataaataaccatggcatcattcgctttttgcctctactaagcaatgtgaagtaatatgaagattgcattttctccccacctgaactccttaaataaaatgtcaaacacaaagtactaaattggattttcctcctattaaattcatgccattatatacattaaagctgttgttttagaatttaatgtcaatatagctctaatttctccttataatgctccaagctagtaaagtgtagattccattaaaggaaaataaactgaattcttatctgatttcacagtaataactcatttcactttggggatttcttttcatgaacttttccaaacagcccataacttggacctctgtgcatgattttaagtaattagcgcctttttttttttttttttgatggagtcttatctgtgcagtggcgtgatctcggctcactgcaacctccgcctcctgggttcaagcgattctcctgcctcagcctcctgagtagctgggactacaggcacgcaccaccacgcccaactaatttttatatttttagtagacacggggtttcaccatgttggccaggatggtctctatctcttgaccttgtgatccaccctccttggccttccaaagtactggaattacaggcatgagccacagcacccggcctttctttcttttttttatttttttatgtttgtttgtttgtttgtttgtttgtttatttattttgagacagagtttcactcttgtcacctaggctggagtgccgtagcacaatcttggctcactgcaacttccacctcctgggttcaagcaattctcctgcctcagcctctcaagtagctgggattacaggcgtccaccaccatgcccagctaatttttgcatttttagtagagacagggttttgccatgttagccaggctggtctcaaactcctgacctcaggtgatgcacctgcctcggcctcccaaagtgctaggatcacaggcgtgagccactgtgcccggccagtaatgtgcatttttgattgtcaggtatacatacaactcacaattacacatagttgtcctctggtaactatttgaaacatactgcacttccagtcacatacacagtacttattaatatagatatgtgccaagctcttaatatggaaacagttactgggaagactccttttgatcaccctgaaaggcacatattaaaatgcaatgaaaatgtattcacatatattaaaatccccaagggtatgttaaaaaccccagccatatcttctaaatgacagtgctgctctggccatggtcttaataacaaggcagttcatggtaaactgccagcactgttcagggagtggaagaataaataaattcaagttctaagataccccaaattaaatgtgtcttaaagttcttatatctctaaatgatgagtcagccaggactctcaacgctagaccatacgattccagagtgagagctaaaaccctatctaaacctaacactttctcttgagggcccctttccgtattatcttccagcttcagagcagcagggctcctgcctcccacttctctgtgtgtgagttatgaatgtcttacccctgaggcatggaggaatggtgacttcttttcaagcagtaatgttccttgcccccggtttaaaacgcctgcatttaaaagccttagttgtttcctggcagcattactcacagtagccaaaaggcagaaacaacccaagtgtcattgatggatgatgaatgtaggtgtttcaaaacctcacttttaatgcatctcatattagtaaaagtaatttcacagcagcaaagagaacacgataaattttgcacggtgcaattggtcatcttaaaatcaagattggagattgtgggttcgggcatctgtgttcttggggttggccaattaagttacgtacttgggggaaatttttaagcaggggggcaagggaaagaaaaactcatttatattccagacagtgtattttaattaattatgttactgtacacaaaaaacttttattttcaattaaatttcttaaattttcaattgcatactaataaaacagtaattgattttttttaagcgttacaataaacatgagaggggaggggaaagacaccatagtgacagggtacagaaagtttctcaaaaaacttcaaaaagctgttttgagacaaattactgtttttagatatgaaaagttcattgttaagataaaagtgggccaggtacagtggctcacgcctataatcccagcacttcgggaggcccaggcgggcacatcacctgaggtcaggagttcgagaccagcctgaccaacatggtgaaaccccatctctactaaaaatacaaaattagccagacgtggtggcgcatgcctgtaatcccagctactggggaggctgaggcaggagaatcacttgaacccaggaggtggaggttgcagtgagccaagattgcgccattgcactccagcgtgggcaacaagagtgacactccatctcaaaaaaataaaagatgataaaagtgccaggcacggtggcctacacctgtcatctcaccactttggaagcctgaggcagaaggatcacttgagcccatgagttcaagaccagcctgagcaacaaagtgagatccctgtctctcaaaaaaaaatttaaaaattagccaggcatagtggtgcatgcctgtaatcccagctactcaggaggctgaggcaggagaatagcttgagcccaggaggttgaggctatagtgagccatgattctgccactctactccagcctgggcaacagagtgggcaaagaaaaagatgataaacgtattatgtaatataatggtcggcatgtattgtacatatgtatctatggataaaattaacattaattaaattaacactctaagcacttaatgtgtgttgtagctctttagttaaagattgtttccttcttttcccatgtgaaatttttttttaagaattaaagcccaaaggcattgtctgatatttagcaagtacattaaatctgctagacttattgtcttccctgctaacttagggtatttttttggttgtccgcctctatggactgtggtaaagctaggattagtaaccagacattacttaccttggctccgatctggttgccacactggccaatctgaatatggacaatttcacgcatccttgctctgagcccaagtctgagatcttcacggaatcctcagactctcagaatccagagcttcggttcactggtgtgagcccaacacaactgtggtcactgcagtggtgggactggccaaccaagctaccctcacaatgtgaccaagggtgtgtccaccccagaggcccagctccccgccctcagccagtcctgg

SEQ ID NO: 941 - DNA, 23632 bp, Homo sapiens
cccggcgctaagaggcggggtttccttgcgccgcgcgcaaggctggggcaaaacccgggccgggatagggcgtggggccgcgcgtctggacgtccctcgcgtcgggcccgacagcgcctgcgcactgcgccgccggctggggtgctgggggcggggcaggggcaggtgtagcctctgtgcctcgttgtcccctggcgctacccggacatctctcagggtgccggcaccatgaagatctggacttcggagcacgtctttgagtaagtttggggcgcgggtcggctccgtggagggcaggcacgccggccctggagtagaggcgaggcagaggcggcccgcaggaggcttctaggcgtcgggcctagcgaggggagcgaactctgaagcctgcgggccccggcgacacggagggcagaccaaggtcacgaccccgaggcgccctagccgaggggacggctccgacctccagacccaggcggccttgcgaccggcagggctacggggtcacttccgggctgtcccccaccatgaggtagcctcgggccggcggcctcctgaggtcctgggggcgtcgcggagcacgaagcccttgacagcactcagggttgccccatcccgccctgtgaaaccactttgggacgtggacccgaggatcccaagagggaggtgttggttttctccagagtgtactttccctggccgccgtttgggtggagtttctaccttcgaatgtgaatttcgggtgaactctgaccaccaggatgtgaagccttttcacaactcgttcatctacgcagcagagccttggatttggaattcaaggtctagctctggctgtaacaagcgtgtgaccctgggttacccattttcatctgagagatggaaaaggacgatcgtcagggcctacccgtgttagctctttgaggccacgttcaggaacatctttttggataatgtgaactgtttactaacgaaactaagccttgaaccagttggatgtggagaattatattctcttctaggtccctgattccatttacaaaagagccacaaatttaagcagcgaaatccttttttttcccgagttacctgctctgttccgctgatcttaatgtcgttgccacactgttttaattagtatagccttgtaaataaatatgctacaaagccatttatgtttttaaaactgtctctgaaggcaaattttttttaaatttcttttttgaggcagagtctcgctctgttgcccaggctggagagtagtggcgtgttcttggctcactgcaacctccgtctcccgtgttcaaacgattctcctgccttggcctcccaagtagctgggattacaggcgcccaccaccgcgcccggctaatttttgtatttttagtagagacggagtttcaccatgttggtcaggttggtctcaaagtgattcgccctggtcaggtcgcacctgacctcaggtgattcgcccgccttggcctcccaaagtgccgggattacaggtgtgggccactgtgcccggcctctgaaggcaacttttaaaacgttgtccgcatttgtactcagtgggacacatcctagggcctgctgtatcctgcaaagtatagaatactggaatcagaaggaagctttcttttccccctactgtttagtctttttgggaggaaaaagacccgaaatttgtggtcatttagatgttcattaacctggtcgcattcatcactagtccatttcagctccgaggatgtttaatttcagtcctcttccaggtttgcatgcttcagtcctcttctgggtttgcatgcttcagaggttctcggcactcagtctccctagaactgtcttctcccatatcttccctaactcttcttcctggctcatcccctccttccctctacactctttctgcctttgtcttcagcgcttccctgtcttttcccattcagtgtaaatgttcagtgagattctgtgttggccttcctatattggattttacctgtgatcttaatttcttttttgtttctcttttcgtcacagactttttttttgtcctgggagaagcagccctgatccgtgctttctccccacataatctgagctgtttggtcaaagtcccaaatgataggtatacatttatggcacccagatctgtaccttgagctccagcctctcttgagctccgcttttcattttcaggtgcctgttaggcattgctaccctcgtgtcccacaggcccttaaaactcagcctgtctgaaattgaagtcatcatctcccctgacaaatctgagcgttgtttctgatctttaggatgtcactctctaacaatgtctaagtcatcattctacatcttatctgtctttgattttccaacacttttcttctgaggcctatagttggcatccaggtgaagtcattcattgattccttcaacttatagagatgcccagtatgtgtcagccactgttctttggattgattacattttcataagtaaatcaagacctcgatgctgcgccagtggagttaataatgtcctcacctcgtttcaaaggtgaagaagttggaccggtcagtgagccatagccaggtcctcctgattctactttggcgtggtctttgaatgtcttccattgtgagatcttttccacgtaattatgttaatacagctcagattaattgctggaagattaatcataataagtattgtttgtaatgtttgagctggttatggttcataaagcaatcttgagccaagctaagtcaacatcagtggtttcaagttggttcagaaaggagagatggactaaattacaaataatgcataaccaccctgaagtcatgcgattattaattttttagagagggttgggggaagaggtaagggcatggaagccagctaaccatggcatatgactggatggagacctggggagggttcatctgattttcattttagagagttgccttggtaagaatcagtgcttggcctgtatgcttcgatttgtcgggacacttcagattgatgaagcaactctgcttatatacctgcattgattgctggataaggctggagactaaagacagaatgaggttcattggtacaatattgtatagaaaagaatattataatgaaaacattaaaaatgatgtcactggttgtccagggttctgggaaattaatggagttgagattttccttttgtcaacgagatgtagttgtcaatctgagttctctaaaaggttggaataatgtctacttgttttacttttagaaaaataaaaagtaatgctgtgtggcttaacagtcattgtggcttgaacatcatccccagatcttgtctttttcctttaaatgaagatgagagcacagataagtagtgtagaaagcatccgaatcagactgcaggtggactaagtcacctttaatactgattgtacttaataaggggtccttttgaaaatgatattttttgtacaagtgtcttattcacagaagttgtgaagtgaacaaaggttgcatcacattttgaatcatccaagcacatgtgcctttttgaagaaaataaagatactgcaagttctcaagtgatgtgatattattaccacttcaatactaggtgataagcaagtgcttattatattaaaagagaatattagaaaatagtatattaggagtgcaccttaaggacattttattatattgagtgaccttttcaaaacagaaatcagaatcactcttttgagaaaaacagtagataaagattgactggaggagccattgttatgtattacattaaaatgaagggaaagttcaataattaaatcaatgctttggatctttttgtgatccctgtaagaatttatagtgcccataaactcttttacttttgttacttccgtataaactgatagaattggggtcagaaaaaataataaatggcataatgatacttttggctatttgtttcagtagaacataatttttaaatacattttcatgaatcattggttcttcctagaaacaatttacatgtgaaagtggataaggataagtaggaaagatggtgtagactgctttgatctttatagatatgagtttttttacatagcctgtattgtggaaaaatactgaagcctgttaaaaatgtagatcagtttcccataatcatcagtgtttcagaaggtaatttttcctaggtaaactcattaaacttacattgtaatgaatgatttgatagattataaaaattgtttaactcatatgcataattttaaatgtctgaatttttttttttttttttttggttcacatcggcagccacccgtgggaaactgttacaacagctgcaatgcagaaatacccaaaccctatgaacccaagtgtggttggagttgatgtgttggacagacatatagatccctctggaaagttgcacagccacagacttctcagcacagagtggggactgccttccattgtgaagtctgtaagtgtgtctttattcccggagaaatgtgactgctgtagagaagttttctaaaccgcattatactttcaaataggttgtgggagccgattctgaatgtcattttttgcatccgttcaagttgtattataataaacttgaattatgagtgtataatgaattggaaatattattacagtcttcatgaaggcacccaataaaattttcttaaggaagccagctaatgccgtgtgatctgaaaggagttctattctgctttttctgcttttgccagcaacttgagaccaatactaaggtttggcagtaatggtctggtcataattgttaggtgacagttctgtggtcagtggtgggttgtgtacattaagtaaggactatgttctcggacttgttattgccacatttgttccaaggtctggaactccttcctgtacatttagaaacaattctattcccttaagaatgagcaggctttagtgagcagattttaccaggaagaaactaaaatgccagtttaccataatgcgagaaaactggtataataagtggatccaggtttctttagagggtctctttatggagagtaggttcactaagaaaactaaagtacacattttcaataggaatgtacttactgcctccttatgcaaaccatagtgcagacacagaaatgagcagggtcagggggtgggcttggggtcatagcacagggagtgacagtggacactgacgtgtgagcctccatcgtaagaacgctgtttttctgtctggagaatgaagctgaggtgccccctcccttgggctgttctaggaagatactgacagatgcctttgagttctcctttttctagctgccatgttgccccaaacctgatttccatatctcagcctcagcgctccaccgtcgcaccgcggcagattcagcgtgctgcctcacgttgcagacgttctcagtgggctggtttctaattgcctccgggaaaagtttttgtgtctggcagtctcctctcatccatgatatgtgaataggcctcctttctgacctttgcttgtttcctctggtttttagaaaacagatttttggttcaaaatattgtaacacattttttccttcaaataaaatattgatagacttggtaagaaattcttcctcctctgattcctagttctgaatgttttacttagcttattggtgcagcaagaacgaaaacatatgtgcaagaacattctgtagttgatcctgtagagaaaacaatggaacttaaatctactaatgtaagtcttggctcccttttgtttcatttcgaactgtctggctgagttctttgtccctctcctagttgccgtagaagtgagtgcgtgttcatgatgtggttcagagaatccctgcttatgtgctggcctaacttggccctggatgttgcttccttacccttcctgctctcatgatcttgcctatctctaaggggatagcactcaataaaatgagtttgggattatgtgtattatcattattatactttatttcctcaactttgctttttaaataaaaagtaggcagtgaatagtttatgcaataatagcagcggtttatttgttgttttgtatgtttagtaagattttggcttgtgtgttgattttagcaacattttgaatcttcagttccaaaatgatttgatcttttttttttttcttcattctgtagatttcatttacaaacatggtttcagtagatgagagacttatatacaaaccacatcctcaggatccagaaaagtgagtaaaaaatattttaacaaatgtatcgtaaagggtgtttaaggtttttttatcaagttttttgaaaatgaaagctgggtcatctgaacctgtgtgaatatgttttgttccagaactgttttgacacaagaagccataattaccgtgaaaggagttagcctcagcagttaccttgaaggactgatggcaagtacgatatcctcaaatgctagtaaagtaagtgaggctgcttcttggttattattccctggttcatttcctgggaatggaatggggtgctgactgcatgtgtgtccttgtaagctgacccttgcccattctaccataggaaactgcagcacgttgggcagttacttacaaaggctctgggttcacatccaagctctaacttttagccttttaaccttgggcaactaagttaacctttctatgcctcagtttcccgtttttaaagtggagattacccgttttacagggttggcgtggagtgaatgagataacatatggaaagtgtgtagcctgaggcccagcactgaggaagtgctcgatgatgtgtagctgcgtgtcatttaaggcactgtttctcaaccttttttcactgttgtctcccccacaactcgttttagacattttttccctaattgccacctccattaagtcatatatcatatacatatgtgtgggctttatacataaaagagggagattttttccatccccccaagaaccaatttttgcttattgagaatgcatgatctgaaacagtaagtttagagaaagatgccatgcactgttacataacacatggtgaatgtggttatcaagagatactcatggatgccttctctgtgccatgcagagtgctaggctagacagggtatacagcagggagcaaaacaaatgtggtccctgcccccgtggaactaagaggcaggtgacattaatcatacagcatgtaattaggaaagaaaaggtacagaaaggtatgagagtgcttattgagtgttcagtaactgatgtttctgctgactgccaaatgggggcaggtggattgcgaggggtattccaagaagagtgttctaggtggaggagctgcgtgtgcaaaggccctgagacaggaagtagggaatgctctgtttttcaaggaactatatagaacactaggagagaaggggtgaggagtgagttgaggaccagatcctgcaggaccttgcacaggattttggtttaaaatgtaaagaaaagggatttgaccttcttgcccctaaaaaggggaccactataatcatgaaacaaataagacattctgtcatttaattgtagattcatttgagaacatcttttgcatacaaagtaaaagtcagtttatggatcaagccagttgctcaaggcatttgatgtttgctaaataacattagaaaaagccaggacaaaaacgatctgtcatcctgagattgagttaaacttgtcacgccccttgttacttcctggtgtgtcattagttcgatatatgcctttgctctccctcagtaacaataaatgtattggattttttttaagggccgagaagcaatggaatgggtaatacataaattaaatgctgagattgaagaactgacagcctcagcaagaggaaccataaggactccaatggcagcagcagcgtttgcagagaagtgatcgtgacagttggtagacaacatcgggtactccaggtctctccaaactgactatatatttatttgttattttaaaaatacaactatattttgggtagtttttttttttttttttttgataagttggtgtaaggctatgtgacttgatcaaaacagatgcagggcctctaaataaaagggatcatctgaaattaatgttgtttgaaattactatctgattttgagggttccagtatttctgtgaaaattcaacaagaactccttggaaactggtattgatattcagtctccttaaggtagatttttcaagcttttcatacattggaactccacctgactttggaccaaccccagaacagagcagagccacctcctatagacgcccattgccctgctgctgtacacttcagcagcttgcacaagggagctcacttaaaaggagaaattgtgtagttttaaaatatattttgtgtaaaataccttactatgctataaaccaccattaaaaaccagtgttttgatttggtacttaaatatttttggagtgaaaattatcactaaagtaacatgactccaacaaaagtatggtttcattataaaagagtactgtattgatttgcccaagttttgtaacttagtaaaggtattaacttccttggatttgtactttgtgatttagtatgctgtatcgtgggctggttatgttaactgaaaaaaataaagtcattacctgagttttgcagtgctctaacttaaacagaagaacagctgttcacatcttttagcattttacatttgcctaacttaaaaattgccatgtgtcaaaatcatggttttgtaattgctaaggcatgatatgtcaggttatttgaatataattactttttgaagtaattgtgaccacaaaacatcttttttacatgaaggagctgtgtatcatttgaaattactcaaatgatgtcttgctctgaggcataaatcccaggtacttagtgtttttaataatatggtgccactgcaggatttgggggcggtggggaagaacaagcataatggtagggggaggcttggcctgaaactaaccactgagtgaattgcactgcaggttttacttaacgggaattccttatttgggatgtcaagagggcagctgcaaactgaaaaacaatccagtaaatgtactttgttttatgtattgtagcaggcaattaactactaaataatagctttgacatttgcaattgttgcatagagactatttttgctagaagatgattagctcttgcctttattttacagtgcttagtgtgataaacttctagtcatgtttcctatccaagagaccagttaatatatgtacataaaccacagaaatagtataacacactatttttaaattatcgttttcctacttaaattttgtttagcttaagacttcttaggacatttgtaaaagcaggttaaatttaataaggtttctgatttttttttgtaaccggagatagtttttacaagtgaaataacatttcagctaaataaaacatcgctaaataattgatatttgatgaaaatctgctttgtataatttctgtaaattatccttgttctgaaaaaggtgtaatgccctaatatttttaaatccttatcctttgattttttaaaaactgacctattgataaaactataaattttcattttccagtgcagttagttacctttttaaacataaatgcacaacaagcaaatgaatttaagagaactaaactggaataagtgttcataaatgaaacccttggactatttaataaagttgaaatgtgaattaaggaaaacttttgttaataaaaactttcttttaagtgatgtttttcctgattataatttctttttagtaattaaaggtgaagggcaaaggcttttttttctttatgagagaaacactttaattcctagactgtgagccttcactgcgttgggttagtttctctaaatcacaggctctgagatgagcattttcccggccgcctggcagttccctgtgcctccagtgggttttcctcacatttttcttcccatccattccgggcaacagtgacaactgttgccttaccctccgtcttgtcgcacatcggaagcaggtcctagaactacagaaaacgctagggggtcctccactgggtttccagggtttagtgtcactccgagaaagggggtgccctaagagcctttctaaatctcagctctcaggacacgcttgtctgtccacagatttaaaaaagccggcgccgtttccctgaagcgggcgcaaagccaggccctcggggcggccgtgcccgcgccgcctcgcgtcctcgcttcccgaaagcacgcggctcagtggtccttagcgagcggggacaccccggccttcttgcccccgtcgtccccgccggggtaatacggaaggtcgggggacacacgccccgggagctcttggagccaataggtgggcgcggccggccggcccgccccgggattggcacccgcagtccagaccgcgcgcgcccattggctcccggcgccggggggcttccgcggcagggcagcaggggccgtgctcaggggcggggccgggtaggaggcggtgattggcaggtccgcacgccccgcctcttccgcttctgtggtctgatcttcctgcggctgaaccgcccggctgagccgacattgccggcgtcttggcgattcggcccgacgagctccgctttcgctacagcatggtggcctactggagacaggctggactcaggtaggcccaggcctccagagggaagggcttcgcgagccggcccgcgcgcatcccggtgcccagaggtcatgcaggacacagagcagcggccccacgcgtgaccggggttgggccaagcctcgggcgtcgccgccaagatggcgtcgctgtgggcaaagcgctcaggcgggcgcggcctcgacctcgcgtgggagcgcgtctgtgtcctgcctcgcttcccgacggtgcggcccagcacccacagagtgcccctggacacctttgtgaatggcaggtttctcgagagagaggccagctcttatttagcaaacctttttcttctagaatggtgctggagccaggtggtgaaagtagtacagtcacatccacctcgggaaacaggagatttctctccacgtgaccgccgttagcagctttgacctttaatccagcatcgaggtggagccttttacaactttacacattttttttttaaacttttaagtcctgttgatttcaggtttccttatgtctaaaaggggtgaaagccataactgtcgagagcccctcacaaagatgagaggtggctcctggaaagctcaaatatggaacccacttgaggacatggtgtctcatagtggaaccgcaaaccattggtctagctgtcacatccgatttttttttacccgtgcacctgagtgagcagaagtaccttgctctaggtgacacaccttgttagttgactggatggtgtagcactttacattttgtgggtacactacagcggagcttcccgacttgctgaggtcaagccagcgaagtcttgtagaattggaaggatggaaggatgatagtcccagtagtagataccgtttattaggcaacctaccctgtgatccatactttttcacacttgtttttcctcctcccagctatcagcaggacaggtattattgtccttttattctgttgtttttttcaggtgagtgagtaaacgtgctgaaaaggttgaacagcctgaaggtcacccagttagtaagaatggaagcaggcattggaactcatacctctgagtccccaaaataaattctaaaacatgagaaaatagcacccctccccgcttcctgtttttcaaaagtgggaaaggtgatctgacatcttttggaaactacagtgttgatgggagtccatctaccaaacaggaagcaggttttacagttttgctagaattgatgatgttctctaagcacttttcagtttgatttagaaatcttcattaggaggttattttcagtggcagacttgtgagacagaattcagtattctcagagaagagtttaaataatttagaacgaattgttttaattcaaaatagttttctcttatgtatacctcattttccaagaataatataattaaagttttaaggagagaaatcgaggagagaattcatgattcatgttatagtctctaaacatttcagtctctttttttctatgctgtgggatttttaaaaacatttatgcatctttcattttgaattaatatacactaaagagaaaacacagtacaaagaagaaaaatcaaagatcatccatccaaacaccagttaatactttggtacatttttttctagttctttttctttgtatagatactttttggcattagtcatatttttaaatccaattctacaataaggtacaaccaaaccaaaataaaaagtacaggaagaaaagcgaaaacacagtaacagctgtctggctggaatattgataattaaccatataccttctctcattttctcccagctacatccgatactcccagatctgtgcaaaagcagtgagagatgcactgaagacagaattcaaagcaaatgctgagaagacttctggcagcaacgtaaaaattgtgaaagtaaagaaggaataatctgtaagttatggatttatttagaagaacagttgcatcttaagtttttggagcaccataaagatcaaaataattttagttttgggttctattcattttttagtcagtgtatttggaagttagttattgggatggtataatttaaagcatgcaggttatagaagtcccctggcctaataaaaagaaagtcttcttgggccctgacaagcagaagtaattggcacattgattttcagttcatttagcaatgcttaggtagagagccatcgtatttgaattaaacctgtttcatttgtctgcacaaatcaaataatttggaggatgaactccccacttgtataattgcaattggagttacataacagtccaagagcatgaaaaactacagttctttacatttttatttcccccacaaccactaatgttctcacaaatcactacttcccgaacataataactacaggcacaggcaagggtcctgctgttgtatcaagcaataaaatctgcaagaccccgcagcgaatactgttttgctaatttattatgctttcagagggtttggttcattttacttttccaaagatgttggtgatgtaaagttaaattctcgtgaaataaaaaggtctgtacagttgataagtgtagacttttgtgttccacattataaaagtggtttgatctctaaagtactttcttgacattgttatttcaaaagtaggcaaggcaaattatcagagagatgtttttcagatttaatttttcttgttttgcttttaaaaagcttcagacccataatagcacagaaatgtgataaatattaatcctttggcagcttatggttatgagcaattttacttattggaactgtctcccctaagcacttttcattttcattttgaattagtaaatattttattacaagtctggagatgcagtgttttgaatttagccctttttctaggggctctctgtctaatctcataattctgagtaatgagacctggttttatgttgggttgttttgttttaacagtaagctaacagaaaatcatttagcctcactcggctcagagctgccagactgcatctaatgctgagattttgcaaagtcctgggggtcaggaagtagtgtccgatccccttaaacaaagcattagcccctctctgttatgcccttcagggttacagaccccacctcattagcacaaggagatgttagtgtcttttaaaggcaaagtagtttctttattctgggagagtgtttacttttactcagcaggaaaatgcctgcttgactaagcctgtgtacttgaaccagcactttttacatctgagccacggcaatgtgaatgatagccacagttatacagttcactataaggaagttatttcttatattcatgttgagtttttaagaaaacacagagaactagccagcaacttgcattttctttttcctcctagaccctgactaaagcttgaaatgctacatttccaaggtgaagatgtgtgggcacatgttatggcagattgaaaaggatctcattccatgggaaaaaaaaaaatcctgtcttgttcataaattgacaatgtcaataaattgaaatatggttcactgttactcttgattttagtttgtgagactttttcattttctttaaaggaactgtctgcacagctgcatgattatggccatgtgaaccagggtttcttaaaagcaggggaagccagatttaatatttagtgaccaaagggatacagaaagcattttgaaaatgtctcaaaatagttgtttcatgacattaattggtgatcaaaattatctgctgtcattgaggcttcgtagtcccttatttttgaattgttgtcatgtcagaataatgacatggttatcagtaacaaatggaaataattattaaatactaaaagtgtagattagaagaagaaatactaaattgtacttgttttgtattgtgcacttaaagcctatagataagaacggttacagaatttaagcacaaagtgtttttcacattgttttgtaaatgaatctttatactctggtagcatttctcataggaaatgaggcaaagctattgaataacttgctcattgagttgatggccaaactgaaattaaaacctaggagttttgactgcaagtctgggacacggtgaccacaacagcagtttcgtggtatttccatagtgattcattcattcattatttagggatgaaaaattgttgcaagttatgtttttatctttctttgaaacttgaaagggcttgggcaagtaaaacaccattgcaaagttaactgcctgattttaactgtttttggagactggagaaataaatttgaactggaaattttgacacaccattctaggatcagttctcacatggtacttaagctcacaatgatttatcagggccactgtcagcaatgccgaggataagccgaaaagaacatctttgttctcggcttctgggaatgacttattgtcccgacacttgacctgtaggttttactgaattctcagcacagagcgagcagggaggcagagccaattgagtggaagagggtgcctctggaaaccagcaggttaggagcccttggagtcctccgcctcggagctgtcatcctgctgttggcaagttagggcacctcagttcagtgctgtggcccccaagattaaggtactaggaagtatcctccattacagggaacaggaataaatgaatcaaaaagctatcgggcctttttgacatgggacgaataaagtaactaataggcaaaggggctaaatgatttccagtcaagtaattagagataagtcatttattaaggaggcagatggggtattattggtatatagatggcatagtagattgctagtatattggtagattattggtatatagatggtatgttaaggaggcagatggggtattactggtatatagatggtatggtagattggtagtatattggcagattattggtatatggtatgttgaggcagatggggtattactggtatatagatggcatagtagattggtagtatattggtagattattggtatagagatggtatattattaaggaggcagatggggtaattagaggtgagacttagggacagggcttgtgatatggaaaggagtgaagtcactgagtaaaagacaagtttactgtcagcagagattcttagaggctcttttctccgtgattaaaaaaaaatcctaaaccagtagtataataaacttcctgcctccagcagtgctgggtagctggcaggatgactgtgcccagtgatgaggtgaccccagtcagaccaacttaatgagtatcccactaattagttggatgatgtttgaagctgtcagttaatctcttagttcacatcgttcttgtgagcaaagtgaaggaatcggataagctctaaatttcggtgatgctgctgctctgagagaccaaggtcgctggagcaaccgtactgctaaaggataagctcttcaaaatcaaaagggacagatttcttaagtttctagtttgttttgtgtttttacatctatttctaccatacgaaagagtaggatggtgagatgcatttctaaatatttttaactactcagtctggatggttaggcttcaagaaaaggaatttatttagtctgaaataaagcaattttgccatttaaaattgaattactttgtagtttaatgattactattgagcaaacaaatctttacagtaatataagtcagcaaaagttttttaaaaggtttaaatccctccttccttacatctatttcattgcttttttaggtttgggaagtaaagcaccagaggaagcatgtgtaaatccttgtataatcgcaggctgtaagtctttagcatctcaggaagttactaacttcaaactaagtatataggtagagtttcttactaaatctagtgcttcttgaaccacaagtagaaagcatttaaaacatgaatgttgttttgtgttttttgaagtttgtaaatagaagacttgttgatgatccgatggcaaggtatttttctcttggtatgtattttagttatttcctcgtgatgcataagtgaaaagagtgaagtttctcagaatgagcaactgtcatccatctacctgctattttattattgctgattacaaaagcaaatcaagagatgagaacccagttgcctgcaagtaaatatttactgcattgagggtcggagcattttcccattaccggttatccatggatcaaatagtgtatctcagtggtaattctagagggccattaaaaccctgatggtgctggaagagatggcagtgctgcatgtcagaaataggtaaactgtaattaagaagttacagatgatttgattacgctcttgtgtatttggtcctgttataatgtgagcagattaaaatcatgtagtgcttaaagctatgtcattatgcaaacatttatggcaacttctgcaaattaatttgaactgtaaaagttccctaatgagacgatgtcctccataactgagaaggacactgcagccattgctgcttaattcctgcatttgaatggttgccgagcgcatggtgtgccctttctcaaagagcagagaggctgcagagcattttggggggtgatgactgaatgaaagtgaaaagaccatttcaaaatagcctttaaaaggaaagccaaggatgattattaatgaattcctgggatctaacagtagtaagaaatttaaactatataaacatatatgttaaaggctagctcttcagaaataaagatcagaagactgcagttctttagttttgcttgtctttttgtttttcttgtttggaccaggtatttttgtggagaggactgtggcttttcttttttcctcttttccagttagcatgttgtatgcacaggtctacacaacatggatatttctagtggatgttgactcacattgaccttggctctgtagctccccatgtactagtcaggcacctggctcttctggaggctggcaggcactggaaagcaggatgccagtcagtgtttgctcagaggaaagaacctaaggaaagagtcttagtagccctcggataccaagtgaggattccagggtgcctatcagtgctgctaaagtataaaaatgtaacaccaactccagtggctccctgcaaatccacacgtgtagtctggatgcctggcaaacactttgaaacaaagggagcactttacaataaatttgctatttttttaagttaataagtatgcactgaacatcaaactcttcaaggttagtagatgtcagcaaagaccctaatgcctgtcagctgctccccacctgtctccctcagtccctgtgtcgaagctaatggtgagtgcatatcattcactgtgctgcagtgcagagtgggttttggagtgctgcaggagaaacactcatctaatgagaaactgttctgtaagcgactccgcggcacagcttctctcacagttaatgtcccttatcttctggctccatttctgcctcctccgtgacctcttcatcttcctctagaactgctttggcatcttgaaattgttggtactcggataccaaatcatggatgttattttcagcttccccaaattcgtttatgtccatcccttcgctggtgtaccagtgcacaaaagctttccttttgaacatggctgagaaatgctcagagaccctattaaagatctcttggatggccgtgttgttgccaatgaaggtggcggccatgctcagcccccggggcgggatgtcgcagacagccaccttgacgttgttgggaatccactccacaaagcagctgctgttcctggtctgcacggagagcagttgctggtccacttccttggtggacatcttgccccggaaaatgcaggccactgtgaggtagcggccacggcggaggtcacaggcagccatggtattgcgggcatcgaacatctgctgggtgagctcggccacggagagggctcggtactgctggctgccctgggccgtgagtggggcaaagccgggcataaagaagtgcaggcgggggaaggggaccatgttcaccgccagcttgcgcaggtctgcgttgagctgacccgggaaccggagggaggtggttatgccgctcatggtcaaggacactaggtggttgagatccccataggtgggtgtcgtcagcttcagggtacggaagcagatgtcatagagggcctcattgtcaatgcagaaacaggcatctgcattctcaatcagctggtggatagacagaaccgcgttgtagggctccaccacagtgtccgacaccttgggagaaggcatgacgctgaaggaattcatgatccggtccgggtactcctctctaatcttgttcatgagcagagtgcccatcccggagcctgtgcccccgcccagggagtggacgatctggaagccctgcaggcagtcacagctctcactctcgtgcctcaccacctctaggacattctcgatcagctcggctccctccgtgtagtggcctttggcccagttgttgccagccccagagttacctgtggccaaaaagagaaaccagcaggggaagaaaggtgaaaagagaagggcaccagtaaagcatccccccctcctcctggtggaaccttctggaaaaacataccatggacaaaactgtcgggttgaaagagagctcctaatttgctagatcgaatgctgtccatcgtcccaggttctaggtccaccaagactgctcggggcacatatttcctacctgtgtagaaaaataggaaaaagtcagcctacttgtttttctaaaagttaatgttttatcaaaatagaactttgtgatactggtccaaaaaaaatcatggatattctagaaaggggcccttggtaggtcgagatttgagtatctaacatcatattttttaccccaacaacaatcccacaaatctatagaatacccagaaacaatctccatcagtctgctctgtgatattgccagtgacagagattctcttccttcatattggaaatgatcctggtttcatttgtgaaaccacaaaggaaagtgagtacttaacctgcttgtgttaaggtgtgtgccatatccagcagctccttccccattcctgcgtcttgaccagggcttggggacccaccactctaggatcctgctgccctgcctgtcgcctccctgagcatagacatcactgctttgacatttccatctcctgggcctctgcccttcctctgcttgtgttcccagttgcgggaccactgctcccagagccccgccagtcctaccgtaggcttcgttgtagtacacgctgattctctccagctgcaaggccgaggccccgcggtcgctcccagccaagtcgatcccgtgttcctcaccaatcatctcccagaactgaaagcaggaggaaggtcagagtaaacggaccccgaaaaaggctgtgttaaccacagagaaagttagcattcccaagcctgtttccctctggttgcctgaccctccccaagacattcttttagggccttttcataaataaccatggcatcattcgctttttgcctctactaagcaatgtgaagtaatatgaagattgcattttctccccacctgaactccttaaataaaatgtcaaacacaaagtactaaattggattttcctcctattaaattcatgccattatatacattaaagctgttgttttagaatttaatgtcaatatagctctaatttctccttataatgctccaagctagtaaagtgtagattccattaaaggaaaataaactgaattcttatctgatttcacagtaataactcatttcactttggggatttcttttcatgaacttttccaaacagcccataacttggacctctgtgcatgattttaagtaattagcgccttttttttttttttttttgatggagtcttatctgtgcagtggcgtgatctcggctcactgcaacctccgcctcctgggttcaagcgattctcctgcctcagcctcctgagtagctgggactacaggcacgcaccaccacgcccaactaatttttatatttttagtagacacggggtttcaccatgttggccaggatggtctctatctcttgaccttgtgatccaccctccttggccttccaaagtactggaattacaggcatgagccacagcacccggcctttctttcttttttttatttttttatgtttgtttgtttgtttgtttatttatttattttgagacagagtttcactcttgtcacctaggctggagtgccgtagcacaatcttggctcactgcaacttccacctcctgggttcaagcaattctcctgcctcagcctctcaagtagctgggattacaggcgtccaccaccatgcccagctaatttttgcatttttagtagagacagggttttgccatgttagccaggctggtctcaaactcctgacctcaggtgatgcacctgcctcggcctcccaaagtgctaggatcacaggcgtgagccactgtgcccggccagtaatgtgcatttttgattgtcaggtatacatacaactcacaattacacatagttgtcctctggtaactatttgaaacatactgcacttccagtcacatacacagtacttattaatatagatatgtgccaagctcttaatatggaaacagttactgggaagactccttttgatcaccctgaaaggcacatattaaaatgcaatgaaaatgtattcacatatattaaaatccccaagggtatgttaaaaaccccagccatatcttctaaatgacagtgctgctctggccatggtcttaataacaaggcagttcatggtaaactgccagcactgttcagggagtggaagaataaataaattcaagttctaagataccccaaattaaatgtgtcttaaagttcttatatctctaaatgatgagtcagccaggactctcaacgctagaccatacgattccagagtgagagctaaaaccctatctaaacctaacactttctcttgagggcccctttccgtattatcttccagcttcagagcagcagggctcctgcctcccacttctctgtgtgtgagttatgaatgtcttacccctgaggcatggaggaatggtgacttcttttcaagcagtaatgttccttgcccccggtttaaaacgcctgcatttaaaagccttagttgtttcctggcagcattactcacagtagccaaaaggcagaaacaacccaagtgtcattgatggatgatgaatgtaggtgtttcaaaacctcacttttaatgcatctcatattagtaaaagtaatttcacagcagcaaagagaacacgataaattttgcacggtgcaattggtcatcttaaaatcaagattggagattgtgggttcgggcatctgtgttcttggggttggccaattaagttacgtacttgggggaaatttttaagcaggggggcaagggaaagaaaaactcatttatattccagacagtgtattttaattaattatgttactgtacacaaaaaacttttattttcaattaaatttcttaaattttcaattgcatactaataaaacagtaattgattttttttaagcgttacaataaacatgagaggggaggggaaagacaccatagtgacagggtacagaaagtttctcaaaaaacttcaaaaagctgttttgagacaaattactgtttttagatatgaaaagttcattgttaagataaaagtgggccaggtacagtggctcacgcctataatcccagcacttcgggaggcccaggcgggcacatcacctgaggtcaggagttcgagaccagcctgaccaacatggtgaaaccccatctctactaaaaatacaaaattagccagacgtggtggcgcatgcctgtaatcccagctactggggaggctgaggcaggagaatcacttgaacccaggaggtggaggttgcagtgagccaagattgcgccattgcactccagcgtgggcaacaagagtgacactccatctcaaaaaaataaaagatgataaaagtgccaggcacggtggcctacacctgtcatctcaccactttggaagcctgaggcagaaggatcacttgagcccatgagttcaagaccagcctgagcaacaaagtgagatccctgtctctcaaaaaaaaatttaaaaattagccaggcatagtggtgcatgcctgtaatcccagctactcaggaggctgaggcaggagaatagcttgagcccaggaggttgaggctatagtgagccatgattctgccactctactccagcctgggcaacagagtgggcaaagaaaaagatgataaacgtattatgtaatataatggtcggcatgtattgtacatatgtatctatggataaaattaacattaattaaattaacactctaagcacttaatgtgtgttgtagctctttagttaaagattgtttccttcttttcccatgtgaaatttttttttaagaattaaagcccaaaggcattgtctgatatttagcaagtacattaaatctgctagacttattgtcttccctgctaacttagggtatttttttggttgtccgcctctatggactgtggtaaagctaggattagtaaccagacattacttaccttggctccgatctggttgccacactggccaatctgaatatggacaatttcacgcatccttgctctgagcccaagtctgagatcttcacggaatcctcagactctcagaatccagagcttcggttcactggtgtgagcccaacacaactgtggtcactgcagtggtgggactggccaaccaagctaccctcacaatgtgaccaagggtgtgtccaccccagaggcccagctccccgccctcagccagtcctgg

SEQ ID NO: 942 - DNA, 835 bp, Homo sapiens
cgtgctcgcgggagggtagcggcaaagggaggcctagtgattgcaggattccgggtctggggaggaagaaagtggtgggaaataggtgatgctcagaaaagggtgctgagggagaaggcgcggggccggggagtgtggttggcctattagaagtaaggattgatagggcctgggtggagatcagctgggagtgaaggggggacgggcttgggttttgaaggtgaaggtctctggagaactggggacacgtggatctggagtaagaggcacctactgaaaccggaagtggcctgagaaggttttatgtgaggtgtggacgggaggctattggactagaaggcattagttggtctgttaggacaaagtatacaagcagcaaacgcggtagatttatgtgtggtaggtgaaggctgtgaatcttttatgagtagttgagcaagaacagttgtctgattctgcggtgtcggagagtggagggtctcaggtagtgtcttggtcaggtttgaaggttaatttactgctagtggagggccaaatactccaaagagtttttaattctcactactggggctgatctcctcctacactccaccccgtcctgccatccctgtgacagttcatctcgttttgcctcagcagcacaagaactcactccctccgaagtaatggcatacatattgtttgcttttgactagatggcagtcaggaatcccttaattctttatgttaaaaaaaaaagtgttggtttaaagacaacatcagaagatactctcagaaaatctgccctccaggggagtttctcagctgtcatgttgggcatgtgtaatatagcata

SEQ ID NO: 943 - DNA, 836 bp, Homo sapiens
gcgtgctcgcgggagggtagcggcaaagggaggcctagtgattgcaggattccgggtctggggaggaagaaagtggtgggaaataggtgatgctcagaaaagggtgctgagggagaaggcgcggggccggggagtgtggttggcctattagaagtaaggattgatagggcctgggtggagatcagctgggagtgaaggggggacgggcttgggttttgaaggtgaaggtctctggagaactggggacacgtggatctggagtaagaggcacctactgaaaccggaaggtggctgagaaggttttatgtgaggtgtggacgggaggctattggactagaaggcattagttggtctgttaggacaaagtatacaagcagcaaacgcggtagatttatgtgtggtaggtgaaggctgtgaatcttttatgagtagttgagcaagaacagttgtctgattctgcggtgtcggagagtggagggtctcaggtagtgtcttggtcaggtttgaaggttaatttactgctagtggagggccaaatactcaaaagagtttttaattctcactactggggctgatcctcctcctacactccacccctcctgccatccctgtgacagttcatctcgttttgcctcagcagcacaagaactcactccctccgaagtaatggcatacatattgtttgcttttgactagatggcagtcaggaatcccttaattctttatgttaaaaaaaaaagtgttggtttaaagacaacatcagaagatactctcagaaaatctgccctccaggggagtttctcagctgtcatgttgggcatgtgtaatatagcata

SEQ ID NO: 944 - DNA, 348 bp, Homo sapiens
aagtgctgggattacaggcgttagctccgcgccggccaaaattattccataaatttatccataaaaattccacataaattttctggagtttgattatgtattaggcttgttgggaaatttattacccttgtgaagaattttgtagctaagtagcttgagggtttttttttttttttcactcaggaaagacatggtatgtatgcatcactgctattctatttgaagcttttggaatttttatttatggggtgtggatagaggctggaggcagagactgaggtcagagaagaggtagtagaaaagaaggtggcccactaccatatttccagtgtatttaaatgggagata

SEQ ID NO: 945 - DNA, 349 bp, Homo sapiens
aagtgctgggattacaggcgttagctgccgcgccggccaaaattattccataaatttatccataaaaattccacataaattttctggagtttgattatgtattaggcttgttgggaaatttattacccttgtgaagaattttgtagctaagtagcttgagggtttttttttttttttcactcaggaaagacatggtatgtatgcatcactgctattctatttgaagcttttggaatttttatttatggggtgtggatagaggctggaggcagagactgaggtcagagaagaggtagtagaaaagaaggtggcccactaccatatttccagtgtatttaaatgggagata

SEQ ID NO: 946 - DNA, 2359 bp, Homo sapiens
aaatttatctctgtaattctttattaaaaatactgctgtacacatagagactgaaaacaggattaaagatgaataacacaaattgggtcatgacattagaacctaacacactggtgctttttagggaagttgttgacatccaaatcacagaaccaaggtcaaaagcaaaatacaaaggtaccctcaaaaatatttacaatgaagtaaatacactaacagaatttaaaacaggtacaaaatattgaaatgaccaacgttacatgatttcaagggttgtcctttctgtgcttttatctgtcacgacaggaaggtgtggaaagtttatatccttaatttgactactcttggatattaaaatctttctattaattaaaaagacttttagacaacctcttaaatggaattacactatggaaaacagggctcccccaaaaacacctaggcagaactgagagttctttgaaaaccattcccaataaaaactaaatgaaaaataaatataaaacaaagcttaaaaaaatatgcattacctgacaccaaccttttctggctgacaatatttattcatgaaaacatatcagctgtctaccttttatatgcaaaccaagtcctgaggttaactaggggctgaagcaaactagcatttaggatgcaaacattcttggatttgtgatgtaaacttgccttgcacagggaagtttgctggtctatacagaatgagaaattcaagccctattttaacccctgccctctttagctttcacaaaacattggtccacaaattaaattttcaaaaagttcccagaccccaaaactaaaatagatgatcccctttcattttcaaagaaaacaatattggaaaaaatctccagcccgcttataaattaagcatttcatatttcttctagaatacaagtagttcttttttgtacaaaagaatacaatatgatttgtcaaaaaacatataaaaagacagctgctcttcctcaaatacatgagctaatgataaaagactttttcatgttaatgtctccaagttcttctttttacataaaaaagaacattatggtggcaaatgtgaattatccttttaatattgaacattatattcttttaaaatccatccagatcaaatgcaataattttctttttaactcaacaactgatgctaccaaacgtggactcaatatacttgttaaaacgtgtaaagcgtgtctctagtcttcaaagctttcaggtgaagagaggtgctttttcttgatgcaaatctcaaggcagagaaaatcattttaaagcttataaaaagtggacagagaaatattaaaaacttctctgaaatatacaaatatgtgtaattattaaaattgaagacagtaacatcagttgcaagtgcttggaagtctgtcctgaccttttgagtttccacattttcttcagttgcatggtgagcacccagtgctagtaaaacattcagtgctgggaaaggagatatagtcttcattactgttttttaagaaagaaaattcctatgtatttggcagtcttcagtatcaaagtataggtatttcatttactagaaattccatgaatacccaagtttggcgacaactgcatgtccaaatattaagaaagttaagaggaggaaaatcccaaacttttgagatggacttattcaggaatatcgcacagagtgagttattatcaaaagtactattactttgggctaagcagtgactgcaaaggcacagcagatcgttatccctccaaattcaggctgtaaaacatcagaaagctcttgataccagaccactgctgagtttagttcatcttctgaacagtgtctctgtgtctgtctccagtgtaaaggaccataataaagctgtggttcaaagagcaaaacttcataaacctcccccccgcccaaaaaaaaaaaaaaaaaaaaaaaaaaaaaccagcaaactggaaagaacctaaagtaatacactcctgaactttaggcctttaacacaatttcttaattttctcctatttaaaaaatttgcataaatgtaaatgtatctgactagcaggcaaatgtctttttaaaaaggctctagttgaatttgaaggaaagagctatacatgctccttcagttactgtttatctgatctttattcagaaaggatttaaatcaactaacagggaattcatatccaacaattcactggtattttcttggtatgttcttaagaacaaaacaaaacaaaaatctcaatttgaactaacagtgggtggcatacagagagcttgcatacgatactcttacaagaattacgtactatactgaacttctatgaaattatttacctggtccgtaat

SEQ ID NO: 947 - DNA, 4857 bp, Homo sapiens
gtgcttttttagcaaatactacaactgaccatttgcagctgcaatcagttcttgaaaagtattttcaaagcagcgctttaagtcactgtaggtcaccacaagtacactcttctcatctctggaaatcaggcttattttttctggcacaccagcatctagctgaaacaatatatacacaaaatatgaaattcataacatgcagaaaagaatttatctacgtttgcagcaaaaataaataaaatatctaaattttttttgtcacattccctttcagatatccatgagtacatttatatcattcatcagtatgcacataattttcgactcagacatttttacacaaacactgccctatgtttctatcccttcacgcttaacgtttgtttgtattatagtttacccagttgatgctccataatttttctcccagtatcttccatttttggcataataaattacagtgcaatgaacatactcatctacttaatttttttcttctgtgggaagtactttttccttaggaaaaatacttagaagtataaatattaataataaaatgtaaagtattaagaaattggtttttaaaaaattttaaaaaaacacaaaaaagtaaagtagaagtggttttatagcttagtacatagaaccaaattgttttccaatcagacaccatgaatttataagtttttatttttatttatttaatttttggggatggagtttcgctcgttgcccagggtggagtgcaatggcgcaatcttggctcactgcaacctctgcctcccgggttcaagcaattctcctgcctcaacctcccgagtagctgggattataggcacctgccaccacgcccagctaatattttgtattttaagtagagacggggtttcgccatgttggccaggctggtctcgaactcctgacctcaggcgatccacccgcctcggcctcccaaagtactgggattacaggtgtgagccaccgtgcccagcctaatttataagattttaatacttttccagcaaccccacagcaaatgagcaccttgctatttaaatttagattttaactactattatcaaagttttttcatacatttacttttggtatttctgcttgtgtaaatgctagtatatgatctttactcatgaccctaatggaatttggcagtaatattttagtgaggtctttgtaaagcataaatactgatccttagtctatcaacttgtcttgttatggttttcactttatttttgttattttcaatgtactttatttcattaattgatacataattcattaaaatatgtttacaactcactgaaggctcaaacattcaaatcatttaccagacaatttctgtcattatttctaccaaaataagcttatataaaatcttaattttgtataatcaatctggccatccttcccttttaatttatcacactcttttcaaacttagaatattgtcacacttcagatttggggtattatttactactagctagttcatgatgtgaaacagaattttcttcaaattttcaattatcctaatattcattaaatgatctttgatgaatttaatattatcctaatattcattaaatgatctttgcttaaggcaactgtccatggcttattccatattacctacttgtcaatgtttgttctggttctacgtatttttaactactggtactctgatactatgctctaaaatctgacagaattattttctacatattgctctcaagaaaaggtttttcccctaacataaataaagggaaaataaatatataactcatactgaattagttcaatgatacatatagtcttgtgcagtcttttttctttttttgatacagagttttgctcttgttgcccaggctggagtacaatggcacaatctcggctcactgcaacctctgcctcctggggttcaaatgattctcctgcctcagcctccgaagtagctgggattacaggcatgtaccaccacgcccggctaattttgtatttttagtagagatggggtttctccacattggccaggctggtctcaaactcccgacctcaggtgatccgtgcacctgggcctcccaaagtgctgggattacaggcgtgagacaccgagcctggccagttttgtgcagtcttaatgtaggttattgacaatactccttatagagttttaaggaagttaaaggaaggcaaagtagtgcttaaaaacaaaccgtaacattttccctgaaaggttaccacactgtacattaatagttctaaatcatgtgctacagtagatattttttcctctagtacttataatttaggaaagtttagaccaagagtcagtaaatgttttctataaagggtcagacggtaaatgttttaggtttggcttattgtttattttacaactctttaaaaatgtaaaactattcgaggctctcacgctttaaaaaaataggccatagaacggatttggcctgcaggccatggcttaccagctcctggtttatacataaacctatacagagactacatttactcctggagaccagttctaaacttcataatgccaagtaattcataagggaactgtcttctttcttttctctgtaaattttgtctttcccaatcttttctttcttttttttttgagacggagtctcgctctatcggccagactggagtgcagtggcccaatctcggctcactgcaaactccgcctcccgggttcacgccattctcctgtctcagcctcccgagtagctgggactactggtgcctgtcaccatgcccggctaacttttttaattttttagtagggacggggtttcaccgtgttagccaggatggtctcgatctcctgacctcgtgatccgcccgccgtggcctcccaaagtgctgggattacaggcgcgagctactgcgcctagccttttcccaaccttttctaaaacataatgctgctgggcgtggtggctcacggctattatcccaacactttgggggtgggtggactgcttaatctcaggagtttgggaccagcctgagcaacatggtgaaatcccgtatcgaccaaaaggacaaaaattagctgggtgtggtggcgtgtgcctgtggtcccagctattcaggagactgaggtgggaaggaggaccactgcagccctggggagtcaaggctgcagtgagccataagtgcgactgcactatagcctgggtgacagatcaaaaccccgttccaaaaaaaagctcacctcacctctcaaataaatttatgatctattttttatctacttaattcatctaatcatcaaattcaccatttataacagctggacctgctagtaactgatgtcactagtattgtgcttttattatttactacttgattataaaacctagagttaggccgggtgcggtggctcatgcctgtaatcccagcactttgggaggctgaggcgggtggatcacgaggtcaggagatcgagaccatcctggctaacatggtgaaatcctgtctctactaaaaatacaaaaaattagccgggcatggtggtgggtgcctgtagtcccagctacttgggaggctgaggcaggagaatggcgtgaacccgggaggcggagcttgcagtgagcctagatggcgccactgcactccagcctgggtgacagagactccgtctcaaaaaaaaaaaaaaaaaaaatctatagttaataatgatttgataacacccaacataactcacaatgattcggaaggggttcaatttttaaaaaataaacacaaaattatttttttgctttttaccattcactgttttaagcggcataacaaaaccacatgtaaataaaacattgcataaaggagggaagcagtcattttgtgatactttatcataataaaaagatccacaataaaacattctaaaattattcatgaaggccaggcgcagtggctcacgcctataatcctaccactttgggaggctgaggcaggcgaatcacttgaagtgaggagttcgagaccagcctggccaacatggtgaaaccttgtcgctactaaagattagctgcgcatggtgatgggtgcctgtaatcctagctactcgggaggctcaggcaggagaatcacttgaacccgggaggcagaggttgcagtgagccaaaatcaggccactgcactccagcctgggcaacagagcaagactctgtcctccactgccccaaaaaattattcatgcaagtattgtaaaaatcctcccattgtagaaaatgttattaataaaacgtcttacaggctactttaagagtacatcctgatttcttaagtttcctagtatttgtagaagatacaactctatacaaattataggcagaattatgatcttaaaaaatctagatacaaattaccttgttaagacaagaaattatatgactgaggtcaatccagggagcacctgcttctgtcacctgatgaaaaagatgatccctaaagagtttcaacagataacggtctccagtctctgaccaagtgggatccttctgaaacctgggggaaatgaacattttacctcagtaactcatgctgtatggtctgtggccatatgtctattttttagactccaaactagttttactttttcccaataaacaaaaaattgggagggagtctggtacagtgtttttaaaaaataatctaactgaactagtaagtctatgaattccagttttcagttagcaaatgtcagggggaaatcatcccttatgcattcctattttacattacctccttatttcagcccctaccattagataaaatggaaaaggtaaaaatatctttaaatatctt

SEQ ID NO: 948 - DNA, 1300 bp, Homo sapiens
acaaacaaaaaaaaacaaacaaaaaccctataaacataccaattacagtacctgcaaatgaaggttaagtgttaccaaattaataaatataattaattactgtttatttgctttagaaaataattggccatgaagccagaggaccatatctatcttgttcattgttgtattcccagcccctagcattgtgcctgagacatcacagatcccctttaaatacttgctgagtgaattcactttttaaataacagccacatttcatccttttgatctctccaaacttgatttagatgcaacttctccaggagtgcttatgttacccaaagagaaacagatgcacaaagagaaggaatgagatgctcggggatattttatcaaggaaaccagcaaaccgtctttttcctgaagaccttttaagattaggacaagcagctgtttataaaagcagaacagtgttaagatttgaactgtaaagtaggatcatgctttgaagtatattctagctaaaagcaggggataaactagataaaacttggagactctaagacctgaccctgattaagtgggcctacaagtgagaatctgaagaacagctctctggctgaacatatcccttggatgttgttattaccagctgcctctagatttgagaacagtgctgagcatgcttttaaatgatctttgaggtactttaagctagctacacctgaaagcatacctagccctcatttctgtttgcttgaacaagagcctgaaaaagaagtctaaagaactttctagtgatatccttcagtcctgttctaaaaagaacctgtgttcttcaccgagttaaggaaatttcacaactcccaggggctaatgtggagttcattttcacttactgctgaatcaactgaagttcctttcagagtcttttcctagagtggaaaagtatctgagctcttcaacctactattcattagtgctgagagacaaaaatcatgttagagtctataatgtaatggagcataaaacatttaagttatgaatctgcataaaatgtgtaaaagatgaaaaaacatactttaatgtttgtcagtacttattgatcagtgaaagaacattttcattaatgcctcagcctgtgaatggatgtcaataaagatgagtgagaaggtatttcatatacacacacttgttcaatatttattatatgtttattattcataatgtattattatttatacgggaataataatctcttctgtagccaacacagcacctaccctagtatacatacatggtgtaagtatttaaatat

SEQ ID NO: 949 - DNA, 89 bp, Homo sapiens
tgagacggagtctcgctctgtcgcccaggctggagtgcagtggagcgatctcctctcactgcaagctctgcctcctgggttcatgccat

SEQ ID NO: 950 - DNA, 1227 bp, Homo sapiens
ctggagtagaaaatctttcacacataaaacttcaccattagctaagataaattcctttttgtgtggaataacatgattgtaaatataaactgcatttcacaaataacatggatttgaaatacttctcaatgtttgagtcatttacaaactgtgtaaactgagacctggagaccatctaaatcaaaatcctgagtggaacagtattcaaggtaggctttggggacagttcccccaaatgttacactgtttcagtagtgttggtacccatctataatacaaattgttttaaaaataagttttattgtgtatatatcaggtatattacatgatgttatgggacacatatagatagtcaaaatggttactatagtgaagcaaataaacatttccatcatttcacatagttacccttttttgtgtgtttggcatataatacaaatttttcattttgtgtatgttcacatggaattattaagggagaaggaaatgtcaaggaagaagaaattgtgacttaaaattcaatttgggttctatattactgtgccatcaaaaatacttaagatgatccttttaggtgttcacaaatgtttgactggattcaatagcagtggtaattctttgaagaaatacttaattgaggccaggcacagtggctcctgcctgtaatcccagtacttcgggaagctgagacaggaggattacttgagaccaggagctcatgaccagcctgggcaacataggaagacctccgtctctacaaaaaaattaaaaaattagccaggcatggtgatacatgcttgtagtcccccagctacttgggaagcttaggcgggaggattgtttgagcccaggagtttaaggctgcattgagctgtgatcatgccactgcactccagcctgggtaacagagtgagactctcaaaagaaatacttggcgggggtggtggctctgtaatcctagcactttgggaggccgaggcgggcggatcacgaggtcaggagatcgagaccatcttggctaacatggtgaaaacctgtctctactaaaaattcagaaacaaaattagccaggtgtggtggcaggcgccggtagtcccagctatgccggaggctgaggcaggagaatggcgtgaacccgggaggcggagcttgctgggagccaagatcgtgccactgcactccatcctgggcaacagagtgagactctgtctcaaaaaaaaaaaaaaa

SEQ ID NO: 951 - DNA, 6398 bp, Homo sapiens
agtggtgagacacatccagtggacgcccagggagatggaggtgtacatcaggcacttggagaaggtgttaaggcgctatgtccagaggctgcagtggctgctgtccggtgagcctgcccactgccctgaagggtggaggagcatgaggggatgtagaaggctagccccagggaccccagtgtcagtccttccaaagccaggccttcaagaactgcagatcagaggattaggccaggaacatcatccacatacaacatgacactgggaggccgggcgtggtggctcatgcctgtaatctctgcactttgggaggccaaggtgggtggatcaccagtcagtagttcgaaaccagcctggccaacatgatgaaacccgtctctactaaaaatacaaaaaattagccaggcatggtggcgggcacctgtaatcccagctactcaggaggctgaggcaggaaaatcgcagaggttgcagtgagctgagatcgcgccactgcactccatcctgggcaacaagagtgaaactctatccaaaaaaaaaaaaaatgacagtgggttcagaggacaggcaaggggctggataacagggaggtggaacatgggccaaagagccccagcgggagctcacacgcatcccagcctgctctgcaaggccacctgccacaccttgccttcctgcaagtgacaaggggctcactgtcaaaaggtttgctttaatattgactgcgccccagcaaaacagcccctggagatgcagatggtaaggggaactgacagagcagaaaccctctgttttgttttgttttagaaacagggtctttctctgtcacctagtctggagtccagtggtgcagtcatggcttactgcagccttgaactgggcacaagcaatcctcccacctcaaccttgcaaggacctgagactacaggcacgtgccaccatgcccagcttactttatttattttttttagatacagagtctttctatgttgcacaggctggccccgaactcctaggctcaagctatcctcctgcctcagcctcccaaagtcctggggttataggtgtgagctactgtgtacctctttacagagagcaccaagtcccctccaggagaggtgaatggacagggttgggctgtggattaagagacggtctggaagcatcaagcccaagaagacaggcagacagctagaactggacaggaggggattcgggctatggggcctggagggtttctggggcatcaggaggagggaggaagggagtcctatatagagatcctacaggtggctttgtacgtgccactcagggtcctgtgtaaattcattaggtccagtcctctgcagtaggacctggtatagacagtccatggacaggggcgtcatgatgactgctgcttcaggtacagttgtcaggtcagaggctgagctgggacagagaaggcgtgagcctctctccaccctcggttcacattacccctgggaacggtgacataaaaccagagatccagcgatttcttttgtagtatgaatcccccagctcacataccagtacacacccaaacaccatctaatattttaaaacaatgtcatggtactatttaatccaatcacttaactttaaggataaggaaattcaagcccaggaggttataaccgcttgtgcaactcatcacagacaaagccagagctgaaatctcgatctcccaaagcccaaaccactgaccaggtctgtccttggacaatcgacccctcccacagcaccacaaaagccgtctctcagtggggtgacatccaatcaatgatcaggcaggcaacaggtgtcacaagactttatacttgatagatagagtgagggaaaccacccaggaggagggacccctcactccctccctgcctcttccccacctgtctcggagcagggagccgccgactgtttggcaccgttttggagagcaaagtatgcatattgctggacacgtcagggtccatgggcccctacctgcagcaggtgaagacagagctggttttgctgatttgggaacagctgcggaagtgctgtgacaggtaggaggcgagggctgatcaggaagatcaaaggggcagttcctggggcttccctggccaagcacgccccctcttctcagtgccaacaggcctggagtttctgagatgctcttctgagtaacgcgtttgagtaggaaagagcactgtattctgctctgctgtgaaggaaatcagtttttagaggccgggtatggtggctcatacctgtaatcccagcaattttgggggccaaggcaggaggatcacttgagctcaggaattcaagaccagtctcagcaacaaagtgtcatcccatctcttcaaaacatttaaaaattagctgggtatggtggtgtgcacctgtagccccaactacttgggaggctgagaagggaggatcacttgagcccaggaggttgaggctgcagtgagctatgattgcaccagtgcactcctgcctgggcaacagagtaagaccctgtctcaaaaaaaaaaggaacgcaatttttaaaaattaatttcaggcctagggacaattgcaagcacagcaaaggaactaccatgtggccttgaagtatggctttcagctgaacttgatttgttttaaattatttaatgatttaatttttttaatttttgtgaacttgatttttgagtggaggaagttgtttattttccccatccagaagggttgacccgaaggggaccccaggggactctcatcgtagactaggcctcgttcttgccttaatcagagtatacatttattgagcactttctgtgcaccagatgctttacacgcatcatttcatcaactctcacaatgagcccgtgaggtgttgctgttatcggcccccatttttcagaaaaggaagccaggacttcaagaggttaagacacttgctgaagatcgggtaaccagtcactggctgagataggattgtttgggttgtttgtttgcttgtttgttttgagacggggtctcactctgtctcccaggctggagtgcagtggtgtgatcatagctcgctgcagcctcaacgtcctgggctcaagtgatctcccacctcagcctcccaagtagcttggactacaggcgcacaccaccatgcctggctaattttttaaaaatctttttcgtagagatgggggtctcactatgttgcccaggctggtcttgaactcctggcctcaagcaatcctcccagcttggccttccaaagtactgggattacaggcacaggccactgtgtctggcttgggctgggatttaaatctatttctgtctgcattcaaattgtcagtgtgtaccctctcattctcaagaggccccacagccctctccctgaggggccacagggctcgttgtaggggtcttcagtgacgagcaagaatagtcctcatgagggtaacttatctgaattcaatctagacaggcctgttctaaccaatctctttctccccttctctgcccctcacctcctcttttcctcctccccagttttaacctgctcagctttgcagagagctttcagtcatggcaggacacgctggtggagaccacagatgcagcgtgtcatgaggctatgcaatgggtgacccacctgcaagctcagggcagcacctccatcttgcaagcattgctggcaagtcccaccacggagcccgaccttgacgcaaaacaaataccatcatcccctatgctgatgctgcacgatgctttaggatttacaaagggcgctttataatttacaaagcactacatcatttcatcttcccaacacccgagtgagaaaaggattctcaatgttctcacattatagatgaagacacaggctgggtgcggtggctcacacctgtaatcccagcactttgggagggcaaggcaggtggatcacctgaggtcaggagttcaagaccatcctgaccaacatggtgaaaccccgtctctactaaatacaaaagattagccgggcgtggtggcacatgcctgtaatcccaactacttgggaggatgaagcaggagaattgcttgaacctgggaggcagaggttgcagtgagccgagattgcaccattgcactccagcctgggcaacaagaacgaaactccatctcaaaaaaataaaaattaaaaaaaatagatgaagacacagaggctcagagaggttaagtgacttgcttgggattaaccagctaggcagtgaaccatgctatttctcctaaacctcagcagcttccttagtctgtctgaggctgaaagagaatctcagtctttttgaacaggtcagtggcatccaatcagatgcattttggcagaggcggcagcaggcactacctttaggcatttggttcttgtgttctgggtgagcctctcccctgagcctgacagccttcctgcgttctttcagaaagctttcagtttccatgatctggaaggattgtacctcctgaccgacggaaagccagacacaagctgcagccttgtcctaaatgaagtccaaaaactcagggagaaaagagatgtgaaagtgcacaccatttccttgaactgctcagacaggtgcgcaatatggagtctgactgagttttattctttttccacagccacacatctcagcagggagatccaagcccctcacctaatctagctgctcacttagacacgggtttctcctgggccctaatcctgtaaatcagaaattaggagaagcggccgggcatgctggctcacgcctgtaatcccagcattttgggaggttgaggcaggtggatcacttgaggtcaggagttcaagaccagtctggccaacatggtgaaaccctgtctctactaaaaatacaaaaattagacaggtgtggtggtaggcgcctgtaatcccagctactcaggagactgagacgtgagaatcacttgatccagggaggcagaggttgcagtcagcggaggttgcaccatggcactctagcctgggcaacagagtgagactgtcaaaaaaaaaaaaaaagaaagaaaagaaagaagttaggagaagcattgtttttctagacggcccaagccggtgtcacaccacagggtgaaaacccctctctttacccagatatttccctctgacttcctccagcctggaaacacatttgcaagggattcacacagtcattttacagtctccctcctactcttccctgggatcacatttgtgaatatttaggggacatttaggggaaaagccagagagaaaaatattaatgtagcattgtcatggttatttttttttataaacgatcactatagaccatgtgctatgaccgggcacaatggctcatgcctataatcccagtgctttgggagactgaggtgggaggatcacttgaggccaggagttcgagaccagcctggatatcatagcaagattccatctctacaaaacaaaataaaaatgtgaaaaagaacacatgtcagataagacatactcagctccttcaaaaaaaaaaaaactttattattagcaaaacagactgcatagggacacattttatctcttggtctaaaccatgagccccataagtgtaatatgtgtgtcctttacaggcctaacacatagtaggcactggataaatgtcccataaataaatgggggctaggctgagcacgacggctcatgactgtaatcccagcactttgggaggccaaggcaggcagatcacctgaggtcaggagttcgagaccagcctggccaacatggcgaaaccccgtctcaactaaaaacatacaaaaatgagccgggcgtggtggcaggtgcctgtagtcccagctactcaggaggctgaggcaggggaatcgcttgaacctgggaggctgaggttgcagtgagccaagattgtgccactgcactccagcctgggtgacagactgagactctgtctcagaaaagaaaagaaatgggggctggagtgtgtgggctgtgtggtttcagggggtccaggctaaatggtgacactcacacggggactcctcttccctcaagcagcagcagttgctatagctgtccagaagctggtggggaaagtgtcctctaatggtggtctccatgggacaagccacggcccattgccaggctgatttctcttaagccccacggacttaagttccccatggacgtggggagtcacacgaacttgcctggtcagtcagccttcccaccagccctctgtcccttccttccagagcggcggttgagttcctgagaaagctggcttccttcaccggcggacgctatcactgccctgtgggtgaggacacactctccaaaattcacagcctgctgaccaaaggcttcatcaatgaaaagg

SEQ ID NO: 952 - DNA, 6398 bp, Homo sapiens; identical to SEQ ID NO: 951

SEQ ID NO: 953 - DNA, 734 bp, Homo sapiens
aaatggtcgatcaaaaggaaccaactatattgagcaccatgcgtgatcatctgatcgttactgctaccttgtgagttaaaggctactcttctcattttagaaatgagaaaagagatgcccagagaggacgagtaacttgccttaggtcacacagcttatattaatcacaataacatttgccgcaccttctgtattttttttaagttgctaagcttttggtgcatgtctggcaccgttttagttgtatattatttcatttaattgttaaaatgaccttctgatgcaggtatttgtagctttgccattccacagatgaagaaacagatgaaaggactgaattgttcaataggaaggagcagaatcaggatatgaacttgggttggcctgattcttggggctgcattctttccataacataattgcttgctgtgatgtcctgggctactctgccaggggtggttagtggagtgaatggagaataatttagacaaggtcagtaactcccatgccatctagaaattaaaagtttaaaaggcagagtctgcaactctccttgatttctacagaaataaagatgatccctcctgtgacagtgctaagtgacaattctgagtgtaaatgcgctttttggcacaaattgtcctgtcctaatagtcttgattataattataaaataatgggtttctgaaaggctgcaagcagttctgggaatggcaataaaggtttagaaatga

SEQ ID NO: 954 - DNA, 814 bp, Homo sapiens
taaaatattctcccagttttcgtgcacagacagatttgggaattactgttataatggaaaatggagaataaccacccacatttaatatggttattggttttgttcttgagatttattgctaagattcatgatagcccaggcaaggtcagataatgtatttttattttacactgtatagttgattcttctcaatcccactagatcagactctttgggatactaggattggcctatttgatggtgagctcactacatccatttagatgttgtgtccatgcaatcattttagttctcctagtttctacctatcacgttgtcattttcccttctttatcatcctgggtagctgagaccccacataaatatataccagaaaaatgttgtggtcttttctaaactctctgaggcatctgttgtcaatgtgatgttgttttttgtttccagtccaaaatatatcaaagtaaaatttaactccacttttgctaagtattcatcttgccttgagtactaagattccaaaaatgactttcccctctgaaaaacacaggatttccttgcgaaaacttgctgggccactgccaatcttcccagaaactcctttttccttatcgttgaggggaattggggaagtgatcactgacggttgaaattcagtagttttggtctttaagctgagaccctgagtcttctgaggagtctactgctccccagtgggaaacacctgctgtcaaaattttcctgcttgcaaagagcacttttgaaattaatggcaggggatgaatatctggctagtgctgtgctcagctgagttatt

SEQ ID NO: 955 - DNA, 2505 bp, Homo sapiens
cctgggtgtgtttccatgtctcatgtactagtgaaagtagatgtgtgcatttgtgcacatatccctatgtatccctatcagggctgtgtgtatttgaaagtgtgtgtgtccgcatgatcatatctgtatagaagagagtgtgattatatttcttgaagaatacatccatttgaaatggatgtctatggctgtttgagatgagttctctactcttgtgcttgtacagtagtctccccttatcccttatgcttggtggatacgttcttagaccccaagtggatctctgagaccgcagatggtaccaaacctcatatatgcaatattttttcctatacataaatacctaagataaagttcatcttctgaattaggcacagtaagagattaacaataactaacaataaaattgaatagttataataatatattgtaataaaagttatgtgaatgtgatctctttctttctctctctcaaaatatcttactgtactgtactcacctattttcagaccataactgaccatgaaacctgggaaagtgaaactgtggataagtgaggaactaacatacatacatgattgtttatctacagatgtatgcctcagtttcttagtatgcttgaaaatgtatgattttgtgtatatccgtgctacatgtaagtgtggttctattcatatttgaatatgaattctgcataagtgtgtttattcaagcaaatgtacaaggctctgagaaggaagatcaacatacaacttggaatatttcaaggccgaaatattcaaggctgacattggcctccttcctatcagttccctctcccagatggaaattctagaaatggcaggtgaggtggacaagcagggaaagaaattatatgcatagaacagaaggagaagaaagagtaaagtcaggcctcagccagcctctttttagctctttaaatcctctggatttaagagggataaagggtggaataaggataaattaatgccaattgtaatgccttaaatttgtgtgataccttacaacttgaaacatattcacaaaactatatatttgaatatctcattagctgagtaaggtagcaaatcataattaactttttccattttattgatgggaaagctgaagttcaatgaagtaaatttttcaatagcccacagagtaggaaagtgacaaaacctgagcctgggcctccaggtcactcaaggacactttctttcttccacacccaattgcttcatgcttaaagttggcaaaacaggaagtgaaactcctgcagttttctgtgtggttgacactagcaagggtttctcagttgaagccatgaatcattaagccaatacatatgcatatatgttatacataccaaatgatttatttataaccctatctttccataaaggacttgaaggagcttcaaacaaaggatatgtgaacaatagggttaatcaataataagtagaaaatctggacatagaataaaaagaggagagaaagacaccgagaatgagcgttaatacagtgctttccatttttctggtgttttgagtagcgtggcttttggagaaagccaaaactcaaatcactccttatcaactgtgtgcctgggctccatttctctgagagtctacttagctccaatgtaaaataagaatagaactatgactttgtaaggttgctctaaggattgaaaatcatgtattatgttcaatacggggacactgtccttatgggtgagtactcccctaagactttattaagagggcactaggagaagcactgggaggtcttctcagtaacaacactaaagtaattgctatttttccagcctgtggaaccacagaagtgactgtaactaaaattagacatttctttctgattcattctctactcacgggattgtcagaccccagtcttcttctggactctataaactttttagaaatcatcagcaggctcctggagaagcttaaatgaactcacacaatatgtgacagtgaactccctgggagagtgaaaaccaaagtctaagccagtgtctccatttacttgtgtgattgtgggcaagtcattcaagtgctttgaggctcaggtcttaattcatgaaatggaggtaataataccttgttggcagacctcacttggttaaaatgataatgttgatagttacaatagttacatttaattgatcaattgttttatgcaagggctttatttgtgctatctcagtttgtcacatcaatgaattagaaaagatacgaaagtatttccaattttacaaatgaggagtctgagtctgggagtcattctgtcatgtgtccactgtcacctgctcattggtggcagcactgagattaggatctaagtccacttcaccgcagaagcagggcttctaaatactgttctatggcaagagcaccctgctctcacaaaatgcataaaacttcctatctcaccattataattttgactgatattaaacaaagagaagtattattatta

SEQ ID NO: 956 - DNA, 340 bp, Homo sapiens
ctagactaagctgggctgtaataacaaacatgactgaaatttctgtgacttcatacataatttttttttttctttcccacacaaatgtcacactggatgcattggctttctaggacatcttccttttaagcagtgactcgggaatcgaggccacttccatcctgtaacgacgccatctggagcatgtggcttccaggggagcagtggctgaggccctgcagtggcttctcactgctacagtccagagttgcacacagcacttctgctcatagtccatcagccaggagctagtcatgtggccacctcgctgcaaggatccaggaaggcagagtgcgggtga

SEQ ID NO: 957 - DNA, 340 bp, Homo sapiens; identical to SEQ ID NO: 956

SEQ ID NO: 958 - DNA, 441 bp, Homo sapiens
catgcaacacagaactcattgtcgtcctctccccaaatgtgccctttccgaagcttggctaatgacaggttgcttgagccagaaacaaaggaatggtcttagacttcccttctgtccgcattcccccagttccatctcacacatgtctcctgagagcttctgccctctgcttctgtccgccgggctggtgctcagccagtgcacgctgcgtggccctcctgactgtagaagagcctctcttgttatggggagaggacttctctgtcttccgaggacttaggccgagcattactgcctgtgtgtacttccctgaccgctctgccctggcagaatttgatgctcaacaactgtggctctgagggcacagccccgattgctctggggtagagctttttcatcgttgctctaagtttcttaaatggggaagctctttaccaagtg

SEQ ID NO: 959 - DNA, 441 bp, Homo sapiens; identical to SEQ ID NO: 958

SEQ ID NO: 960 - DNA, 7880 bp, Homo sapiens
tgttctccatagtggtgttcggctccatcgtgaacgagggctacctcaacagcgcctccgagggggaggagttctgcatctacaaccgcaaccccaacgcctgcagctatggcgtggccgtgggcgtgctcgccttcctcacctgcctgctgtacctggccctggacgtgtacttcccgcagatcagcagcgtcaaggaccgcaagaaagccgtcctgtccgacatcggtgtctcgggtgagccccacccagcaggtaccccctgcacagagtctacagagggctgtcccggccataggaggcggctgccacccttcttcccatgtttcagatgaggaaatgaggtgcaggcgggtgaagggatggactcagggtcacatggctggcagcaggaaggatgggaccaggacagggcctgggaccccaaaataacccatgctgcccacaggcaggggagcgtggatgggattctagttccttctagtctaagggacccatggatggcactgggcatgtgccagcccccatgggttggcccgtgtttcagtggcctcttctgtgccacctccctggggcagcctcatgaggactaagcaaggcggtgactgggtgcccagtgcacagcaggggccctggagcctcagcctccccacgcctcccagccagaccttggcaggaccagggcctggacctgtggagccaacctgacctgctgccctttgcccttcagaagcagcctttggcagaggcaccctgacctctgctccgtgacttccaggaatctgattggtggatgctctcagtcaggggtccgaacccgaggcttcagcctcgctgttctgaggcttgggtccccggactgggaccaacccctagttctaagcctggagctctcaggataagccaggctgaaggcaggtcatgaggtctagttttagaaggaactagaactaaatgaatggttctcaaacttccacagagcctcagggttccctggcagtgcctctgggaggtgggctgggccccaggtgggcaccccacctgcttggcagatgcacgccttgtcctgagcaggtctgggcttctctggggagaccttggcactcacaggagattgcgtggctatgaggctcccactgctgacgcccccaggctcggctctcagtgggcccctcgctaaacctggggctctgtggggtcgcagcacgttagaagtcgaagcccagacccacccagccaagctgccatccttgccccagcctcgtcctccttcccatacctcatttgtctggcagcctgagggttggggtcttcctgcctgcagagttgcaggcatcaggggtggaccgggggggcccacgtcagcggtgtggctggacatgggggtttggcagaggctgcagaaatgcggcctgagttgattaccttctttctctgtctctccctccatcctcccctctcactgcccgtggctctcctctgactggccctgaccctgccctgtctgtggcctcctcccccctgcatctggctggcttccctcttctcgcctgcatcttctcttggctcccctctctcttcccctaccccctttgcctctccctttgggggtgggggagcatgggagatgcactcttgaatgtccctctgttcctcggcttccccattttctccccactcaccctctcccccatgtgtggcactgcctattctgcccggtcctgggaccccccagccttctgggctttcctctggttcgtgggattctgctacctggccaaccagtggcaggtctccaagcccaaggacaacccactgaacgaagggacggacgcagcccgggccgccatcgccttctcctttttctccatcttcacctgggtgagtacagccaccgcgcaccagcccacactcgtcccctttccccactgagcccctggatgggtggcctttcgctagcctgggacccgctctgcctctgggagcccacactaccctcgctccctcttctgcctgcctgtctgcggcgctcacagtggtgctgcctccctcagcaaggaggctacagccctcgggggtagcatggtcactggagatggcagaccctcactgtggtgcagagcagccttcctgggggtcacggaccaccccccccccaaaccactctgggtaaatggtgtttattatcccctttcacagatgagaaagcagaggcctagacaggaaggtgaggcttacagggtttgaggctgggaagcagccctgcctaggagtcaggagacctgcttccgatcggggctgcctctgattttcctagcctctgtcttcccatccataaaatgagagggtaggatctgggggacacaggtgtcgacatcagatgcacatgggccaggcagggcctgagagccgtgagcaggccgggtgacacatgcgtgcctatcctaagtcctaagagggtacctctgctcggctgccaagcaggaatagggacctagagaaggcagaagtctgaatttttacatgaaatctgatcttgatatgttggaagtttattcaggtttaaacaatatattgtgtgtgtcaaacaaagtatgtctctgggcccagcaggccctgggctggcagctcggctggcccctctttcccactggtctgggtcatgtctgtttcttctctcctaatcacccttctgcagagatctggggccacatcacctccatagccccatcccaagagccctccccataacccacagctgcctcccctctggaccggcgagcacttctgggcccagcctcctgcaaggagactcttgaggctacatacaggccgccagccgtccctgtttcccccatccttctggtttgccccgggttgacgtctttttctttttgagggcccctggatatccatttttgaggggtacacccatctccccaacaatattagaagatagcatttggagggggagacccgtggttcaggccctagtgggccagccttggctgctccacccctcagtgtcctcaagactgggtaggaagaaccaggtgaccccaggggatctcagtccagagaaggtgccccagaagtggggaccacccagcctacagggaggagtttaggggcggggctcacagaggagtagtggatgatttctagccatgggtctgaagtacctgaccaacaggtgcctgcccggccccctgaagccagcctccctcctggcacctctgcagctcttccccactggcctcacccctactctctcctggcagagcctgaccgcagccctggccgtgcggagattcaaggacctaagcttccaggaggagtacagcacactgttccctgcctcggcacagccgtaggcctccccggcttgcagaggccggcagccctgtatcacccctggcagtgaggtggcaggagcagcctagtgccagaaatgtccaagatgccagggcatgcagggcagtggaaggctggcttgaggaaccaattcaggttctccactgactcattcattccttcaccgcctccttcattgattcttcatgcgttcattcattcagtaaacatttattgagcagctgttttgtgcctagtgatgaattaggtggggtccttggctccaggagcccacaggctggggaggagaaaacaaacacatcaatatctcttccaaatggacagccgtggacagttaccaggtaggtagcggccccatacatgggctgcctagaggcgttcatggtccccattgctgagctgtgggtgcagagcaatagcctctcccttcacagcggtgtgaagagtgacctcactgtccttagggttagcatcctggccgaggatgtcacagggctcctggtctggctctgtcctcatgtgctatgtgaccctgacaaacccgtgcacctctctcagcctcagtccacttacctgaactgaggggtgataatggaccaacctctcaaggctgttgtgccaatgaaacaaaggccagcccagggcttagcacaagcatgctcaataaatgtaagctcttttgttcattcattcattcattcattcattcttctctccagagagtcaggggcacctccagaatctctactttaagagtaattctcatgtgatgaatccttgttcctccaaaggattttggtctctggttctacacaggtttcctgcttgaggcccccagctgcctgggcaggaactcacccattcctccactctctgctggagttgaggaggctggtggagcacagacagttcccccaaagcaatgcctcaaccctgcgagggcctgagcacatcgagagtgagcttcctggcactggaggcatcccagtgcagatgcagactgcctgctgcacgctggagatgctgcagagagagcacctacactgagaaagtggggccaggggaccaccaggtccctgggctctcagtagaactcccatcctccctctgcagcccaggccagcgggggcccaggcctctcctttgctcctgtcttgtggccccttaaactggttgcccaaatgaagctttgacttagtgagggcagagagctgaacacagagacagtatgagtgcctacagccagaggcatctccctagaaggatcagtaggggtcatctgctccagccctctgcctctgtacaggaaaccagcctggatagtagagccagggagctcggggagaaccgcgtctacagacattgctctcaaggttcattcagtcagttcctgtgggctggccagggctcaagtgtaccctcagggggctcttcacctcccctgcttcttcaggctccggcgtctgagcccccagcagccaggacctcatgctaacatagtgggaaaccccagagggctacaccttatcccttagcccaatttctttagacctagtctgcctttcccaaggtgctggcactttgctttaaatacccacctcccagaaagtgcttcccctcagaactttggtcaatgagtacaatcaaaaggtaatgccctagctgggcatggtggctcatgcctgtgatcccagcactttgggaggccaaggcaggcggatcacctgaggtcaggagtttgagaccagcctggccaacatggcaaaaccccgtctctactaaaaatacaaaaattagcttggtgtggtggcgggtacctgtaatcccagctacttgggaggctgaggcaggagaatcacttgaacccaggaggcagatgttgcagtgagccaaggttgtgtcattgcaccccatcctgggtgacagagcgagactctgtctcaaaaaaaaaaagaaaaaaaaaaaggaaatgcccagtcactgggtttctggaactttgtggaataaaacgctaggtatattcactctctacctcttcactaagtggctctttaggttgttggttgacttagtgcctcgtcaggggccagtgaaagggaaggaggtgagggcgccctgacctgggaaggggtaggaccccatgtttagggaagggttctagcagtaactctgccacgggcacttccttttctaggcctcaatcttcccagccctaaaacaggggtctggagagtatcagcacattcccatcacaggcagattccccgggccgggaaagtttctggagaaggcttttgcaataaacctctaagctgcttttctaatgacaagtttgatttacttaaactttgacttagctcagtgtggtcagtgtcattgtccttaataacaatgtaattgcttttattgaaaaataatttcctaaccatgcatgtgtgctgtagacaagtctttcccaatctgagatctgtgaaaaaaaaaaaaaaaacggggcggcttcaggctaggcgcggtcacattgaatagtcagggctctgccaagtcagatgatcctgaaacttgtttcactctatttaactcagtttctcacttagaattaggttcagcagcaggtgaccgaaatcccagataacagtgatttcaacaaagtccaaggctgtggaagtggtccagggctggcatactggctccagaggtcttcggtgacccaggcatctttccttttttttagagacagggtctcactctgttgcccaggctggatcatagctcactgcagcctcaaacccataggctcaggcaatcctcccacctcagcctcctgagtagctgggactacaggccagtaccactatgcccggctaatttggtttttgtggatttttttggtagagatggggtcttgctatgttgcccaagctggccttttttttttttttttttttttttgagacagtctcactttgttgcccaggctagagtgcagtggcgctgtctcagggtactgcaacctccgcctcctgggttcaagcgattctcctgcttgcacctcccgagtagctgggattacaggtgatgccaccatgcccagctaatttttttaattttcagtagagatggggtttcaccatgttggccaggctggtctcaaactcctgacctcaagtaatctgcccatcttggcctctcaaagtgctgggattgcaagcatgagttgtcgcgcctggcctctcctgctttcaagaagaagatcagattgttattgtgcctgctgtttttcaagtgcctttaactcaacatagtcaatatgccagaggtgcatattttagcccaggctggtcttgatctcctggcctcaagcaatccttccaccttggcctatcaaagttgtgggattacaggcatgagccgcggtgcatggcccccaggcatctttcattcctacagacttggctcatggtctttgtggtcccttttggcaattagagctccagccatcacatctgtgttccaggcatcaggtcagagggtgggacagagaacatgagggtaccccattggccaaaacgtagtcacatggccatgcctagctgcaagagagacaaaagaatgactcttaggagatgctaacagtcctttgtcccgctgagaagctttttttaagaaggctgttgtgagcctttgagccatcttaacactccataatggagatctagaacttttggtagcccagactgacctctgggattgggagacaggggcaggtgatttctggggtactttctggctggatgatatggttctgggcatttccgggggtggctgcgagaacagccttccttctccacagccaagcttggtctcatgtttggtgctttgaggatctttaaccctctcctgcctgtgtcctgtgaactaaccaccactaacccagtgctcttgtctgtctctcccctaaccaccccctcccgcctgtccttgtcctcgccggcctttgtccccaggcgggccaggctgtgctggccttccagcggtaccagattggcgccgactcggccctcttctcccaggactacatggaccccagccaggactccagcatgccttacgcgccctacgtggagcccactgggccggatcccgccggtatgggcggcacctaccagcagccggccaacaccttcgacaccgagccccagggctaccagtcgcagggctactgagccacagtgaccgcctgcccccgcccctccccatctgtcccctctctccacacccagcccctgctcctgcccaggctgccctgcccagcgcctcatcagcctctgccttgtcccactgaggtccagggtagctcggggcaggggtggggcagtccagtgttggggactgtctacgtatgtgcaagtatatcccagggcatgtgccccgcaggggcctagagggtgggggccaggggtatttgcattcatacattgtgtcatcaagcattccttgagcgccta

SEQ ID NO: 961 - DNA, 7880 bp, Homo sapiens
tgttctccatagtggtgttcggctccatcgtgaacgagggctacctcaacagcgcctccgagggggaggagttctgcatctacaaccgcaaccccaacgcctgcagctatggcgtggccgtgggcgtgctcgccttcctcacctgcctgctgtacctggccctggacgtgtacttcccgcagatcagcagcgtcaaggaccgcaagaaagccgtcctgtccgacatcggtgtctcgggtgagccccacccagcaggtaccccctgcacagagtctacagagggctgtcccggccataggaggcggctgccacccttcttcccatgtttcagatgaggaaatgaggtgcaggcgggtgaagggatggactcagggtcacatggctggcagcaggaaggatgggaccaggacagggcctgggaccccaaaataacccatgctgcccacaggcaggggagcgtggatgggattctagttccttctagtctaagggacccatggatggcactgggcatgtgccagcccccatgggttggcccgtgtttcagtggcctcttctgtgccacctccctggggcagcctcatgaggactaagcaaggcggtgactgggtgcccagtgcacagcaggggccctggagcctcagcctccccacgcctcccagccagaccttggcaggaccagggcctggacctgtggagccaacctgacctgctgccctttgcccttcagaagcagcctttggcagaggcaccctgacctctgctccgtgacttccaggaatctgattggtggatgctctcagtcaggggtccgaacccgaggcttcagcctcgctgttctgaggcttgggtccccggactgggaccaacccctagttctaagcctggagctctcaggataagccaggctgaaggcaggtcatgaggtctagttttagaaggaactagaactaaatgaatggttctcaaacttccacagagcctcagggttccctggcagtgcctctgggaggtgggctgggccccaggtgggcaccccacctgcttggcagatgcacgccttgtcctgagcaggtctgggcttctctggggagaccttggcactcacaggagattgcgtggctatgaggctcccactgctgacgcccccaggctcggctctcagtgggcccctcgctaaacctggggctctgtggggtcgcagcacgttagaagtcgaagcccagacccacccagccaagctgccatccttgccccagcctcgtcctccttcccatacctcatttgtctggcagcctgagggttggggtcttcctgcctgcagagttgcaggcatcaggggtggaccgggggggcccacgtcagcggtgtggctggacatgggggtttggcagaggctgcagaaatgcggcctgagttgattaccttctttctctgtctctccctccatcctcccctctcactgcccgtggctctcctctgactggccctgaccctgccctgtctgtggcctcctcccccctgcatctggctggcttccctcttctcgcctgcatcttctcttggctcccctctctcttcccctaccccctttgcctgtccctttgggggtgggggagcatgggagatgcactcttgaatgtccctctgttcctcggcttccccattttctccccactcaccctctcccccatgtgtggcactgcctattctgcccggtcctgggaccccccagccttctgggctttcctctggttcgtgggattctgctacctggccaaccagtggcaggtctccaagcccaaggacaacccactgaacgaagggacggacgcagcccgggccgccatcgccttctcctttttctccatcttcacctgggtgagtacagccaccgcgcaccagcccacactcgtcccctttccccactgagcccctggatgggtggcctttcgctagcctgggacccgctctgcctctgggagcccacactaccctcgctccctcttctgcctgcctgtctgcggcgctcacagtggtgctgcctccctcagcaaggaggctacagccctcgggggtagcatggtcactggagatggcagaccctcactgtggtgcagagcagccttcctgggggtcacggaccaccccccccccaaaccactctgggtaaatggtgtttattatcccctttcacagatgagaaagcagaggcctagacaggaaggtgaggcttacagggtttgaggctgggaagcagccctgcctaggagtcaggagacctgcttccgatcggggctgcctctgattttcctagcctctgtcttcccatccataaaatgagagggtaggatctgggggacacaggtgtcgacatcagatgcacatgggccaggcagggcctgagagccgtgagcaggccgggtgacacatgcgtgcctatcctaagtcctaagagggtacctctgctcggctgccaagcaggaatagggacctagagaaggcagaagtctgaatttttacatgaaatctgatcttgatatgttggaagtttattcaggtttaaacaatatattgtgtgtgtcaaacaaagtatgtctctgggcccagcaggccctgggctggcagctcggctggcccctctttcccactggtctgggtcatgtctgtttcttctctcctaatcacccttctgcagagatctggggccacatcacctccatagccccatcccaagagccctccccataacccacagctgcctcccctctggaccggcgagcacttctgggcccagcctcctgcaaggagactcttgaggctacatacaggccgccagccgtccctgtttcccccatccttctggtttgccccgggttgacgtctttttctttttgagggcccctggatatccatttttgaggggtacacccatctccccaacaatattagaagatagcatttggagggggagacccgtggttcaggccctagtgggccagccttggctgctccacccctcagtgtcctcaagactgggtaggaagaaccaggtgaccccaggggatctcagtccagagaaggtgccccagaagtggggaccacccagcctacagggaggagtttaggggcggggctcacagaggagtagtggatgatttctagccatgggtctgaagtacctgaccaacaggtgcctgcccggccccctgaagccagcctccctcctggcacctctgcagctcttccccactggcctcacccctactctctcctggcagagcctgaccgcagccctggccgtgcggagattcaaggacctaagcttccaggaggagtacagcacactgttccctgcctcggcacagccgtaggcctccccggcttgcagaggccggcagccctgtatcacccctggcagtgaggtggcaggagcagcctagtgccagaaatgtccaagatgccagggcatgcagggcagtggaaggctggcttgaggaaccaattcaggttctccactgactcattcattccttcaccgcctccttcattgattcttcatgcgttcattcattcagtaaacatttattgagcagctgttttgtgcctagtgatgaattaggtggggtccttggctccaggagcccacaggctggggaggagaaaacaaacacatcaatatctcttccaaatggacagccgtggacagttaccaggtaggtagcggccccatacatgggctgcctagaggcgttcatggtccccattgctgagctgtgggtgcagagcaatagcctctcccttcacagcggtgtgaagagtgacctcactgtccttagggttagcatcctggccgaggatgtcacagggctcctggtctggctctgtcctcatgtgctatgtgaccctgacaaacccgtgcacctctctcagcctcagtccacttacctgaactgaggggtgataatggaccaacctctcaaggctgttgtgccaatgaaacaaaggccagcccagggcttagcacaagcatgctcaataaatgtaagctcttttgttcattcattcattcattcattcattcttctctccagagagtcaggggcacctccagaatctctactttaagagtaattctcatgtgatgaatccttgttcctccaaaggattttggtctctggttctacacaggtttcctgcttgaggcccccagctgcctgggcaggaactcacccattcctccactctctgctggagttgaggaggctggtggagcacagacagttcccccaaagcaatgcctcaaccctgcgagggcctgagcacatcgagagtgagcttcctggcactggaggcatcccagtgcagatgcagactgcctgctgcacgctggagatgctgcagagagagcacctacactgagaaagtggggccaggggaccaccaggtccctgggctctcagtagaactcccatcctccctctgcagcccaggccagcgggggcccaggcctctcctttgctcctgtcttgtggccccttaaactggttgcccaaatgaagctttgacttagtgagggcagagagctgaacacagagacagtatgagtgcctacagccagaggcatctccctagaaggatcagtaggggtcatctgctccagccctctgcctctgtacaggaaaccagcctggatagtagagccagggagctcggggagaaccgcgtctacagacattgctctcaaggttcattcagtcagttcctgtgggctggccagggctcaagtgtaccctcagggggctcttcacctcccctgcttcttcaggctccggcgtctgagcccccagcagccaggacctcatgctaacatagtgggaaaccccagagggctacaccttatcccttagcccaatttctttagacctagtctgcctttcccaaggtgctggcactttgctttaaatacccacctcccagaaagtgcttcccctcagaactttggtcaatgagtacaatcaaaaggtaatgccctagctgggcatggtggctcatgcctgtgatcccagcactttgggaggccaaggcaggcggatcacctgaggtcaggagtttgagaccagcctggccaacatggcaaaaccccgtctctactaaaaatacaaaaattagcttggtgtggtggcgggtacctgtaatcccagctacttgggaggctgaggcaggagaatcacttgaacccaggaggcagatgttgcagtgagccaaggttgtgtcattgcaccccatcctgggtgacagagcgagactctgtctcaaaaaaaaaaagaaaaaaaaaaaggaaatgcccagtcactgggtttctggaactttgtggaataaaacgctaggtatattcactctctacctcttcactaagtggctctttaggttgttggttgacttagtgcctcgtcaggggccagtgaaagggaaggaggtgagggcgccctgacctgggaaggggtaggaccccatgtttagggaagggttctagcagtaactctgccacgggcacttccttttctaggcctcaatcttcccagccctaaaacaggggtctggagagtatcagcacattcccatcacaggcagattccccgggccgggaaagtttctggagaaggcttttgcaataaacctctaagctgcttttctaatgacaagtttgatttacttaaactttgacttagctcagtgtggtcagtgtcattgtccttaataacaatgtaattgcttttattgaaaaataatttcctaaccatgcatgtgtgctgtagacaagtctttcccaatctgagatctgtgaaaaaaaaaaaaaaaacggggcggcttcaggctaggcgcggtcacattgaatagtcagggctctgccaagtcagatgatcctgaaacttgtttcactctatttaactcagtttctcacttagaattaggttcagcagcaggtgaccgaaatcccagataacagtgatttcaacaaagtccaaggctgtggaagtggtccagggctggcatactggctccagaggtcttcggtgacccaggcatctttccttttttttagagacagggtctcactctgttgcccaggctggatcatagctcactgcagcctcaaacccataggctcaggcaatcctcccacctcagcctcctgagtagctgggactacaggccagtaccactatgcccggctaatttggtttttgtggatttttttggtagagatggggtcttgctatgttgcccaagctggccttttttttttttttttttttttttgagacagtctcactttgttgcccaggctagagtgcagtggcgctgtctcagggtactgcaacctccgcctcctgggttcaagcgattctcctgcttgcacctcccgagtagctgggattacaggtgatgccaccatgcccagctaatttttttaattttcagtagagatggggtttcaccatgttggccaggctggtctcaaactcctgacctcaagtaatctgcccatcttggcctctcaaagtgctgggattgcaagcatgagttgtcgcgcctggcctctcctgctttcaagaagaagatcagattgttattgtgcctgctgtttttcaagtgcctttaactcaacatagtcaatatgccagaggtgcatattttagcccaggctggtcttgatctcctggcctcaagcaatccttccaccttggcctatcaaagttgtgggattacaggcatgagccgcggtgcatggcccccaggcatctttcattcctacagacttggctcatggtctttgtggtcccttttggcaattagagctccagccatcacatctgtgttccaggcatcaggtcagagggtgggacagagaacatgagggtaccccattggccaaaacgtagtcacatggccatgcctagctgcaagagagacaaaagaatgactcttaggagatgctaacagtcctttgtcccgctgagaagctttttttaagaaggctgttgtgagcctttgagccatcttaacactccataatggagatctagaacttttggtagcccagactgacctctgggattgggagacaggggcaggtgatttctggggtactttctggctggatgatatggttctgggcatttccgggggtggctgcgagaacagccttccttctccacagccaagcttggtctcatgtttggtgctttgaggatctttaaccctctcctgcctgtgtcctgtgaactaaccaccactaacccagtgctcttgtctgtctctcccctaaccaccccctcccgcctgtccttgtcctcgccggcctttgtccccaggcgggccaggctgtgctggccttccagcggtaccagattggcgccgactcggccctcttctcccaggactacatggaccccagccaggactccagcatgccttacgcgccctacgtggagcccactgggccggatcccgccggtatgggcggcacctaccagcagccggccaacaccttcgacaccgagccccagggctaccagtcgcagggctactgagccacagtgaccgcctgcccccgcccctccccatctgtcccctctctccacacccagcccctgctcctgcccaggctgccctgcccagcgcctcatcagcctctgccttgtcccactgaggtccagggtagctcggggcaggggtggggcagtccagtgttggggactgtctacgtatgtgcaagtatatcccagggcatgtgccccgcaggggcctagagggtgggggccaggggtatttgcattcatacattgtgtcatcaagcattccttgagcgccta

SEQ ID NO: 962 - DNA, 87 bp, Homo sapiens
caccatgttggccaggctggtctcaaactcctgacctcgtgatccacccgcctctgcctcccaaagtgctgggattacaggcgtgag

SEQ ID NO: 963 - DNA, 2663 bp, Homo sapiens
taagcccttacctagggctgggtggacaacaaggcacagatgagggtgtgactggcccgaggtcacggtgagtgagtggcaaagctggccctgacgcctgggtttcttggccccagctgcccagcaggtgcctcgattccctgcccttgtgacctcccaggaaacagaactgatctgggacactatgtcacctctcctctcatctggggtcagtcagggttcgggggctgcagcagccaagcgcatgagaggtgtttccttggccttccagaaggcccactgtggagccagcctccctatgggaggcagagcggcaaggacagggctttggaatcagccaggtcggctcctgggctgtggccgtggagagacactgcccccaggatgacacaggcaagagcccctgaggcatgggaggcccagggaagaccatgggctgtaggggagagtgtggcaggtgacccaaaggcccaaagagggccgtggggcctgaggaggtcataatctcttctgagtgggggcaggtcgattcttgcacaaggtgggctcttcactgagccataagggacagggaggtatgggagagcgctgggggcccatccccctgtccacccagtgtccactggcctgtccttcagggagcagagcagagcaggtggtggacgggcccagtgctgggtgttttcaccaccatccccccatcccccatctaagaatcctaagaggcaggcgatccctcacctgcttactcactcagcagttacccggcccctgtgctggagataccaagggcatgggtggtccctgcttcgatggccccaaagctgggccagagttaagggaaagaggaggaagtcctaagcagagaagtagcaccattatccccatttaacagaagggaaactgaggctcggcaagcataggcgagttggcagtggaacacggatctaaactcaggtgtgtccaagtcctcccaaaggacagcagtgatggagaggaccccagccagctgtgtgacagctggttgttgctgacttcattttccaatccggagaaggggctctgtccacagtcccccgccgccaggtggcccacatgggaccagcatgggggcaggttatctgttggcctgaagagtgaaacctgtaccaggccaaaggtgagggcgtgagtgagggcaggagtgtttatggcagagtgaagttctgtgcccaccacaagaggctgtgagatgttctgaccctcacccactgtccaccaaaagcctctcctgctgatgggcactaggagacctcagggtactgcccatctgtttctcctcgggtgccagccagctgctggtgatcctcagccggagggcagggtaccaggtaagcttaactccatcttgggtgtttgtgacaggccctgcctgccaccctaggcagggaaagctgtcaagactcctgccaggaatggggggtgctgagtcatctcacgaagaatccctcactcttcccgggttcagcccagaagcccttccaggcatgatcttccccatcaggctgggctctggcagggacctgcccaggatggagatgagagagggtgagagatggagggcgagatttggatgggacccagggctcctgactctgccctggaaggttcatggggaaactcgctccttctgttggcagaggacagcccctggggaaccccaggcccaactctgtccggtatcccttttcctcccagctgccctcccctacttctcccttgctcccaaagctttccttggagaagggccctcctgcagctggaccctgcagggtggctccctcctccccatcaagcacaagagagggcccaggaaaaaaggtttcacataagtgtagagtcgcaaggacgcttagagtcggcagagtctggggtagggagacagcgacttgtccaaggtcaagcacagagggagaggttcaggagtcaggtcttctgccttctgagttggctcatcctgggcagtcacagactgtcctgcctgcacggctcctatccacctgggggtgtcgcagttgaggggctaattcccaggggactgacgttagttccctactccatccttccctggtgattcttgatcttcaaagcctcggggatcccaggtttccccatgtaactgagacaccctgcctgttagccctgggagacccctaaccttggcccaagacccctttgattctctaaggagcacgaaagggggaatgcccctcccaggagtttatgggagaagggactgggccggctgcctcccagcgatgcacttgacctgacactccccatgtcctggtgcgcacagcccttgtcggtgccccggcccctcccgcagcgttactgcctgtgtatagtataaatatatatattttctatatataagatgtataatataaggctccacaaatatatctgtgtgtgtgtgtgcgtgtgtgtgcggtgaagggcggtccccatcctgggcccccactctagacccccccaccacctggttaagtctcgagtgaatccagtggccccgtggcaccctcctttatgacatccatccatctgtggtgaaccaagtgaaggtggtgacttctggtgacatagtaataaagtgaagactcagaacccaccagcgattgcaa

SEQ ID NO: 964 - DNA, 141 bp, Homo sapiens
gagtgtcttgctctgttgcccaggctagagtgcagtggcttaatcttggctcactgcaacctccacctcccaggttcaagtgattctcctgcctcagcctcccgagtagctgggattacaggcatccgccaccatgcccag

SEQ ID NO: 965 - DNA, 2663 bp, Homo sapiens; identical to SEQ ID NO: 963

SEQ ID NO: 966 - DNA, 2505 bp, Homo sapiens
tgaaatgtattttttgcatgcttgcaaatatatatatgtattacagatacatatgtgtatttgcaccttgcaactggtgctgagatctgtccttttaggtaagtgtatttgtcttttcccctagagagctctttattgtgtcacctttatttaaactgattttccaaagttgtagtagaatctcagcattgaacagtccattacaacagtgtctgatccagccagtcatgtttcctatgagttcaggagtaactaaaccctacagctgctgaaagattgcatctgaaagaagattctgtgttaattcactcaacaattttttattgagtggctgtatgggccagatgctatcttgtgtgccgagatacagcagtgtacaaaatagacacaggccttggattagatggtctgaaatctaattatattactcttcactcttgcaaattttctgttccgtgtgtgcacactaacccattgttaactgcatacctggaaataggtatgactgttgccacatgcctttgtgctctggtcttgatgcctctccagctgcattaataatttgaggactgcgtgtttcatttaaattttattatcctttagacagatctatattggcagaaaaacacactggcaatgttagaagtgtagactggcaatggttttctgaaaagcaatttggcaatatctatcaggagctttaaaaatgtttagatcctctgatcctccaattccacttctgggaatttgtcctaaagaaatagtctaaaatgtgggcaaaatcaaggcttgacaatcttaaagtgtttgtgaagaatatttgacagcatggctagaagcttatagtgttgagtgaaaagatgatgtacaaaattgtatgtataaatccacaaaatgacttttaaaaagatggaaaggatgtgcaaactctgggtagttggatgatgggttttcctgggtgtatgctttaaaaaattttctccagtatattactacttatattatcagtaaaaatcaagagcatctatagctggcagtggagagattgaggccagatcactagtttggtccatgaacaattaactggctgggtggacacagaggctatatgatcttgtgttggcagcaaggtgggacagaagggaaaagcacctgcccaggaggagaagggaccgtgtgactatgtgaccataatccctacaaaaaaacacaaagtgttaagggaagacactgtgggtggcatgctcttgtgatgtagtcgtaggtcggtaaaagaccacttatgaatcaagtatattctgacaagtggaaaaggatatgaatgctctcctgggtaaaattaacctcctttgcatttcattctcacattctcgcacaaaatgaattatcaagatggattttataatagctgattctctgaagaatccctgagactttgtatgattctttagtatagcagtggctttcgatgtgccaagtctacctcctcccatactgggacactcaagcaacacagatgtacacgggaattttgggtattctatactgagaatactgcacacatatcgttagtcatcttaatgttgtaacttaccaaactcttaaggtttgcaaatgtgattttgttggcatctagaaccagtgtattttttatttatgtctgaaaaataatcattgtggggttttaaaatgaaaaatcatgtagctaatgcctatccatagatgaaattgttatgttgggaaaatgtgtacttaatctttgctttagtaaaatgattattataaaaatgttaaaggtctcctcagtgaaattttaaacctccaaatgagtacacaaggtaaatacatattttataggcctatagctcatataatcgccaagctgaaagagttctttaagatctaagtataagtcctctggtctatagaatgaatgagtgaggcttgggtttcagttctggcttcttaactagctatgtgactttgggcagttcatttgtaccctctaaggttgtcagttaattcatctgtaaaagggaagtaatgccatctatctcatggagttgttcattttgttcatttcaacaatatttattgagtgcttatctgtgtatgatgctgttctagacacaataaacaagaccccaagaaatgttcctcctcgtgagcacacatttcagtgagggagacagacaagaaataagataaattagtaggctgggcacggtggctcacgcctgtaatcccagcactttgggaggccgaggcgggtggatcacgaggtcaggagatcgagaccacggtgaaaccccgtctctactaaaaaaatacgaaaaaaattagccgggcgcggtggcgggcgcctgtagtcccagctactcaggaggctgaggcaggagaatggcgtgaacccgggaggcggagcttgcagtgggctgagattgcgccactgcactccagcctgggtgacagagcaagactccgtcttaaaaaaaaaaaaaaaag

SEQ ID NO: 967 - DNA, 2405 bp, Homo sapiens
tgaaatgtattttttgcatgcttgcaaatatatatatgtattacagatacatatgtgtatttgcaccttgcaactggtgctgagatctgtccttttaggtaagtgtatttgtcttttcccctagagagctctttattgtgtcacctttatttaaactgattttccaaagttgtagtagaatctcagcattgaacagtccattacaaaattgtctgatccagtcagtcatgtttcctatgagttcaggagtaactaaaccctacagctgctgaaagattgcatctgaaagaagattctgtgttaattcactcaacaattttttattgagtggctgtatgggccagatgctatcttgtgtgccgagatacagcagtgtacaaaatagacacaggccttggattagatggtctgaaatctaattatattactcttcactcttgcaaattttctgttccgtgtgtgcacactaacccattgttaactgcatacctggaaataggtatgactgttgccacatgcctttgtgctctggtcttgatgcctctccagctgcattaataattagaggactgcgtgtttcatttaaattttattatcctttagacagatctatattggcagaaaaacacactggcaatgttagaagtgtagactggcaatggttttctgaaaagcaatttggcaatatctatcaggagctttaaaaatgtttagatcctctgatcctccaattccacttctgggaatttgtcctaaagaaatagtctaaaatgtgggcaaaatcaaggcttgacaatcttaaagtccaacagtagaaaattggttaagtaaattacagtatgactatccagtagactgttgtgccatcattataatttatgtttctgaagagtatttgacagcatggcaaagtgcttatagtgttaagtgaaaagagtgatatacaaaattgtatgtataaatccaaaaaatgacttttaaaaagatggaaaggatatgcaaactctgggtagttggattatgggttttcctggttttatgctttaaaaaattttctccagtatattactacttatattatcagtaaaaatcaatagcatctagagctggcagtggagagattgaggccagatcactagtttggtccatgaacaattaactggctgggtggacacagaggctatatgatcttgtgttggcagcaaggctgggacagaagggaaaaggacctgcccaggaggagaagggaccgtgtgactatgtgaccataatccctacaaaaaaacacaaagtgttaagggaagacactgtggctggcatgctcttgtgatgtagtcgtaggtcggtaaaagaccacttatgaatcaagtatattctgacaagtggaaaaggatatgaatgctctcctgggtaaaattaacctcctttgcatttcattctcacattctcgcacaaaatgaattatcaagatggattttataatagctgattctctgaagaatccctgagactttgtatgattctttagtatagcagtggctttcgatgtgccaagtctacctcctcccatactgggacactcaagcaacacagatgtacacgggaattttgggtattctatactgagaatactgcacacatatcgttagtcatcttaatgttgtaacttaccaaactcttaaggtttgcaaatgtgattttgttggcatctagaaccagtgtattttttatttatgtctgaaaaataatcattgtggggttttaaaatgaaaaatcatgtagctaatgcctatccatagatgaaattgttatgttgggaaaatgtgtacttaatctttgctttagtaaaatgattattataaaaatgttaaaggtctcctcagtgaaattttaaacctccaaatgagtacacaaggtaaatacatattttataggcctatagctcatataatcgccaagctgaaagagttctttaagatctaagtataagtcctctggtctatagaatgaatgagtgaggcttgggtttcagttctggcttcttaactagctatgtgactttgggcagttcatttgtaccctctaaggttgtcagttaattcatctgtaaaagggaagtaatgccatctatctcatggagttgttcattttgttcatttcaacaatatttattgagtgcttatctgtgtatgatgctgttctagacacaataaacaagaccccaagaaatgttcctcctcgtgagcacacatttcagtgagggagacagacaagaaataagataaattagtaggctgggcacggtggctcacgcctgtaatcccagcactttgggaggccgaggcgggtggatcacgaggtcaggagatcgagaccacggtgaaaccccgtctctactaaaaaaa

SEQ ID NO: 968 - DNA, 2582 bp, Homo sapiens
tgaaatgtattttttgcatgcttgcaaatatatatatgtattacagatacatatgtgtatttgcaccttgcaactggtgctgagatctgtccttttaggtaagtgtatttgtcttttcccctagagagctctttattgtgtcacctttatttaaactgattttccaaagttgtagtagaatctcagcattgaacagtccattacaaaattgtctgatccagtcagtcatgtttcctatgagttcaggagtaactaaaccctacagctgctgaaagattgcatctgaaagaagattctgtgttaattcactcaacaattttttattgagtggctgtatgggccagatgctatcttgtgtgccgagatacagcagtgtacaaaatagacacaggccttggattagatggtctgaaatctaattatattactcttcactcttgcaaattttctgttccgtgtgtgcacactaacccattgttaactgcatacctggaaataggtatgactgttgccacatgcctttgtgctctggtcttgatgcctctccagctgcattaataattagaggactgcgtgtttcatttaaattttattatcctttagacagatctatattggcagaaaaacacactggcaatgttagaagtgtagactggcaatggttttctgaaaagcaatttggcaatatctatcaggagctttaaaaatgtttagatcctctgatcctccaattccacttctgggaatttgtcctaaagaaatagtctaaaatgtgggcaaaatcaaggcttgacaatcttaaagtccaacagtagaaaattggttaagtaaattacagtatgactatccagtagactgttgtgccatcattataatttatgtttctgaagagtatttgacagcatggcaaagtgcttatagtgttaagtgaaaagagtgatatacaaaattgtatgtataaatccaaaaaatgacttttaaaaagatggaaaggatatgcaaactctgggtagttggattatgggttttcctggttttatgctttaaaaaattttctccagtatattactacttatattatcagtaaaaatcaatagcatctagagctggcagtggagagattgaggccagatcactagtttggtccatgaacaattaactggctgggtggacacagaggctatatgatcttgtgttggcagcaaggctgggacagaagggaaaaggacctgcccaggaggagaagggaccgtgtgactatgtgaccataatccctacaaaaaaacacaaagtgttaagggaagacactgtggctggcatgctcttgtgatgtagtcgtaggtcggtaaaagaccacttatgaatcaagtatattctgacaagtggaaaaggatatgaatgctctcctgggtaaaattaacctcctttgcatttcattctcacattctcgcacaaaatgaattatcaagatggattttataatagctgattctctgaagaatccctgagactttgtatgattctttagtatagcagtggctttcgatgtgccaagtctacctcctcccatactgggacactcaagcaacacagatgtacacgggaattttgggtattctatactgagaatactgcacacatatcgttagtcatcttaatgttgtaacttaccaaactcttaaggtttgcaaatgtgattttgttggcatctagaaccagtgtattttttatttatgtctgaaaaataatcattgtggggttttaaaatgaaaaatcatgtagctaatgcctatccatagatgaaattgttatgttgggaaaatgtgtacttaatctttgctttagtaaaatgattattataaaaatgttaaaggtctcctcagtgaaattttaaacctccaaatgagtacacaaggtaaatacatattttataggcctatagctcatataatcgccaagctgaaagagttctttaagatctaagtataagtcctctggtctatagaatgaatgagtgaggcttgggtttcagttctggcttcttaactagctatgtgactttgggcagttcatttgtaccctctaaggttgtcagttaattcatctgtaaaagggaagtaatgccatctatctcatggagttgttcattttgttcatttcaacaatatttattgagtgcttatctgtgtatgatgctgttctagacacaataaacaagaccccaagaaatgttcctcctcgtgagcacacatttcagtgagggagacagacaagaaataagataaattagtaggctgggcacggtggctcacgcctgtaatcccagcactttgggaggccgaggcgggtggatcacgaggtcaggagatcgagaccacggtgaaaccccgtctctactaaaaaaatacgaaaaaaattagccgggcgcggtggcgggcgcctgtagtcccagctactcaggaggctgaggcaggagaatggcgtgaacccgggaggcggagcttgcagtgggctgagattgcgccactgcactccagcctgggtgacagagcaagactccgtcttaaaaaaaaaaaaaaaag

SEQ ID NO: 969 - DNA, 120 bp, Homo sapiens
tctacagatcatagaggtctcaaaatgtttggcacataatcgataatgtttatttagctgatcaggtgttttatcttctaagtctgctctcctacagttctccacccacttctggcatct

SEQ ID NO: 970 - DNA, 334 bp, Homo sapiens
agtagacatagttaatatagaaacagatgagcacagctgtgttccaataaaactttataaatggatactagaatttgaattttatatagtttttacaaaatactattttgatttttttaaaccattgaaaaatgttaaaaagaggccgggcacggtggctcagacctgtaatcccagcactttgggaggccgaggcgggtggatcacctgaggtcaggagttcgagaccagcttggctaacatggtaaaacctcatctctactaaaaatataaaaattagccgggcgtggtggtgtgtgtctgtaatcccagctacccgagaggctgaggcagg

SEQ ID NO: 971 - DNA, 501 bp, Homo sapiens
agaagaccgaaacggctgtttctcttaaagaaaagatgtgtgccctatgtcctgggccaaatgctggagcactgagcaaagtttgcagtattagaaggaaactgcctactgcattatttatgggagaccagggcattgacagaaagccaggaaaaggagagtttaatggtttgcggttttgatatttttgtccattgtagaaaatttggaaagtttagaaatgtttaaagaagcagccagaagtccactcctagagttcgggtctgtcatcagacccatctccttgcctcagcttcctccttcaaaaacatccagccaggctgggtgcggtggctcatacctgtaatctcagcactttgggaggctgaggtgggcagatcacatgaggtaaggagttcgagaccaacctggccaacatggtaaaaccccgtctctactaaaaatacaaaaattagccgggtgtggtggtgcatgcctgtaatcccagctactcaggaggct

SEQ ID NO: 972 - DNA, 84 bp, Homo sapiens
ttttttttttgagacagcgtcttgctctgttgcccaggctggagtgcagtggcgcgatctcagctcactgcaagctccgccacc

SEQ ID NO: 973 - DNA, 334 bp, Homo sapiens; identical to SEQ ID NO: 970

SEQ ID NO: 974 - DNA, 3891 bp, Homo sapiens
gggaaccgcccaatcaggcgcgcggtggcagaggagaggaaaggagggcgtggcttcctgcatttggcgggatctgtgtctctcgctggtgctggcacaagagcttgggatccgtctcctctttcgcctcctgcaccttgggagccccgggctactctctcacagcccctgttgccctgtgatctgtaggtcttgggggacgcatagttaaggtgccaggacatcctggaagctgggaaatggtgagtatacggggttcgccatcccgagaggggagaacagactgtgaaaccggcaggaccggcctccccacggttagctccgagtctcccgcagcttggccctcagtcccctgtggctgcaagatggccgctgggccagcagcgagggcccccacgtcccgtccggcccatccggtcctgtccctgggcagcgccctgctctgcgcccacagccatgagtatttcccagattgttcagggaggcctggtgggtcatcagggaaaaaccgcgactgggtgtttgcgtgggaggagctgcggcccgtggggtccccagtctctcttgttaaaaattaacgggagtctatgttaaaaggttcatcagtttatctgaacaaagagtgattggtgaaatggaaagcacccagccatgatttctggtccaccagaggggcataaaggaaaggcttttataagatgcatgagaaagcaacccaaattcaagaattggttccagttatatggtagccttatttgaactatccagatggaaatgtcctggttacatattcagaggttaattgcatgtttgtcatgggttaaacctgcattttgcttcaggctaagatagtgttttataggaaatatatttgagttaggttttagatttttttttgtttgttttttgctttttacctatgaacacagggcactagagccactttagactaattttctgatctttaattattttaacactccagaggaggactggttttctcctgtgtttttttaatgtatggcaagtggaacctctaatcgaccaccctgtttttcatcctaactcaggcttgcagtaaaattatcagttcccactttctttgctgcattctcaaatgcaacacatgagaccagctttcccttgccaatttacaatgctgttaactatatgtcctttattatacatttcattaaagttttctattatttggtttctttctacttctccctacagttctggcaatatttgctttttatatttagaagcctcccttttgggtgcataaatatataaagctatattctcttgagaaattaacctctattattattgtatggtaaactcatttcatgcttgtgagagacattgctagaaagtctattttgtctaatttaagcattaccgttgcactcctttggttattgtttgcatggaatatcattttctatcctttcacttttagcctatgctcttaattcataattgagtctcttgtaagcagcatattacgaggtttaaaagattaatttatccactctgtctgctttagtctcttttggctgctataactgaatatcacacactggtaattaataaagaatcgaattttatttgacttatgattctggaggctgggaagccaaaacaacatgatactggtatatgttgaaggtctagttgctggataataacatagacaaagatgtgagggagagagagctttttttttttaatatataacagatccattcttgttaaaattagcccattcccataataagaacattaatccattcatgagggcagagttcttagagcttaattaatttttaaaggttccacctcttaattctaacatgttggctattaaattttatcctaaattttggagatgacattcagtgtacagcagtatctgtttagtagatactttaatctttttatttgtaaggtagtgataggtaaggagttactattgtaaatttgtagttttctgtccattttaagtttgcttcttttttttctggttctgtctttcctgtggtattgttcatttttgttgagacaaagttatgctttcttgctcagactgaagtgtagtggcatatcacagctcactgtagcttcaacctcctgggctcaaataatcctcccaccttagccacccaagtagcttggactacagacacgtaccgcaacacccaaggagatttcatccttccaccttggcctcccaaagtgttggaattataagcaggagacaccatatccaatgtgtaatttttgttgtttgtgtatgctttaattactttctctttttctttactgcagtttttttttcctagtggttatcatgagacttaggtaaaacatcttgtattttaatagtctagtttaagatgataacaatttatagtattctgaaattcagtatgtatttaccattttagtgacatttatactttagtatttttcatattgttagttagcatttcatcatatcaatgtgaagatttcttccagaccatggctggagaaggaaagaaggtgtgttttgcctgactcagtgactatagagagaaccaagttctgcaggcctgtcacctaagtctcaggtgagtatgaattctcttgtgtttttcacagattgttgcagtggcaggaccaaggtcaaatgagttatagccaagtctacagtaagatgtggcagtattctgttttgaagccgggaccatgattggcaagcttgccacttggtcaagtgctcaccctctgaaaatgtcttccttggtctttgcctccagctgggtgccacaaactctgaactggatttcaaggctttcatgaatgcacttacgtttgctgtggcagctgcattatgtcgtgggggatgtggatgcagaacctcacattctgtcgtcttgcttatgttactctcctttatgtttcactttctcaaatgaatgtcaagcaggtgattttcagattcaaaagttctaaaataaattgctcaaatttatacattatgtaagctgttaataaaatttcttgtaggtgctacatatttgttaaaatttttggttgtaattttaagctcactgtaggcagaaaggaatcattaagatttctattcttttttagtctgtatctaaatgaccatatattttaattccaaatatttactttatacttcagtaatgctcattgtattttgcaaaatttatattgttcttttatttgaaaatataaggctttttttagctcctgaaagctatattatagtcatatagttttattatagtatttgataagaagagcagcaacatattgagaacagataaaattctgctgtctttttaatgattatttattaaattcttctcattagagcctattattaatgattgtaatgtatttactgtataatttttctgcaatttattaaatgccaatgacttccaatgtctgcttttcatgactgcacacagtttaaagctgtagatatctaaagggttatttttcagcccggcatggtggctcacgcctgtaatcccagcactttgggaggccaaggtgggtggatcacgaggtcaggagatcaagaccatcctggctaccacggtgaaaccccgtctctactaaatatagaaaaaattagccgggcatagtggtgggtgcctgtattcccagctactcgagaggctgaggcaggagaatggcgtgaacccagtaggcggagcttgcagtgagccgagatggcaccactgcactccagcctgggcgacagggtgagactgtctcaaaaaaaaacaaaaagggcttatttttcattgtatatttatgttgtattcaggattttatgcattaaaatctctcttcttattttca

SEQ ID NO: 975 - DNA, 5905 bp, Homo sapiens
gggaaccgcccaatcaggcgcgcagttggagaggacaggagaggagggcgtggcttcctgcatttggcggggtctttgtctctcgctggcgctggcacaggaacttgggatccgtctcctctttcgcctcctgcaccttgggagccccgggctactctcccacagcccctgttgccctgtgatctgtaggtccttggggacgcatagtcaaggtgccaggacatcctggaagctgggaaatggtgagtatacggggttcgccatcccgagaggggagaacagactgtgaaaccggcaggaccgtcctccccacggttagctccgagtctcccgcagcttggccctcagtcccctgtggctgcaagatggccgctgggccagcagcgagggccccacgtcccgtccggcccatccggtcctgtccctgggcagcgccctgctctgcgcccacagccatgagtatttcccagattgttcagggaggcctggtgggtcatcagggaaaaaccgcgactgggtgtttgcgtgggaggagctgcggcccgtggggtccccagtctctcttgttaaaaattaacgggagtctatgttaaacgttaaccagtttatctgaacaaagagtgattggtgaaatggaaagcacccagccatgatttctggtccaccagaggggcataaaggaaaggctttcataagatgcatgagaaagcagcccaaattcaagaattggttccagttatatggtagccttatttgaactatccagatggaaatgtcctggttacatattcagaggttaattgcatgtttgtcatgggttaaacctgcattttgcttcaggctaagatagtgttttataggaaatatatttgagttaggttttagatttttttttgtttgttttttgttttttacctatgaacacagggcactagagccactttagactaattttctgatctttaattattttaacactccagaggaggactggttttctcctgtgtttttttaatgtatggcaagtggaacctctaatcgaccaccctgtttttcatcctaactcaggcttgcagtaaaattatcagttcccactttctttgctgcattctcaaatgcaacacatgagaccagctttcccttgccaatttacaatgctgttaactatatgtcctttattatacatttcattaaagttttctattatttggtttctttctacttctccctacagttctggcaatatttgctttttatatttagaagcctcccttttgggtgcataaatatataaagctatattctcttgagaaattaacctctattattattctatggtaaactcatttcatgcttgtgagagacattgctagaaagtctattttgtctaatttaagcattaccgttgcactcctttggttattgtttgcatggaatatcattttctatcctttcacttttagcctatgctcttaattcataattgagtctcttgtaagcagcatattacgaggtttaaacgattaatttatccactctgtctgctttagtctcttttggctgctataactgaatatcacacactggtaattaataaagaatagaattttatttgacttatgattctggaggctgggaagccaaaacaacatgatactggtatatgttgaaggtctagttgctggataataacatagacaaagatgtgagggagagagagcttttttttttaatatataacagatccattcttgttataattagcccattcccataataagaacattaatccattcatgagggcagagttcttagagcttaattaatttttaaaggttccacctcttaattctaacatgttggctattaaattttatcctaaattttggagatgacattcagtgtacagcagtatctgtttagtagatactttaatctttttatttgtaaggtagtgataggtaaggagttactattgtaaatttgtagttttctgtccattttaagtttgcttcttttttttctggttctgtctttcctgtggtattgttcatttttgttgagacaaagttatgctttcttgctcagactgaagtgcagtggcatatcacagctcactgtagcttcaacctcctgggctcaaataatcctcccaccttagccacccaagtagcttggactacagacacgtaccacaacacccaaggagatttcatccttccaccttggcctcccaaagtgttggaattataagcaggagacaccatatccaatgtgtaatttttgttgtttgtgtatgctttaattactttctctttttctttactgcagtttttttttcctagtggttatcatgagacttaggtaaaacatcttgtattttaatagtctagtttaagatgataacaatttatagtattctgaaattcagtatgtatttaccattttagtgacatttatactttagtatttttcatattgttagttagcatttcatcatatcaatgtgaagatttcttccagaccatggctggagaaggaaagaaggtgtgttttgcctgactcagtgactatagagagaaccaagttctgcaggcctgtcacctaagtctcaggtgagtatgaattctcttgtgtttttcacagattgttgcagtggcaggaccaaggtcaaatgagttatagccaagtctacagtaagatgtggcagtattctgttttgaagccgggaccatgattggcaagcttgccacttggtcaagtgctcaccctctgaaaatgtcttccttggtctttgcctccagctgggtgccacaaactctgaactggattccaaggctttcatgaatgcacttatgtttgctgtggcagctgcattatgtcgtgggggatgtggatgcagaacctcacattctgtcgtcttgcttatgttactctcctttatgtttcactttctcaaatgaatgtcaagcaggtgattttcagattcaaaagttctaaaataaattgctcaaatttatacattatgtaagctgttaataaaatttcttgtaggtgctacatatttgttaaaatttttggttgtaattttaagctcactgtaggcagaaaggaatcattaagatttctattcttttttagtctgtatctaaatgaccatatattttaattccaaatatttactttatacttcagtaatgctcattgtattttgcaaaatttatattgttcttttatttgaaaatataaggctttttttagctcctgaaagctatattatagtcatatagttttattatagtatttgataagaagagcagcaacatattgagaacagataaaattctgctgtctttttaatgattatttattaaattcttctcattagagcctattattaatgattgtaatgtatttactgtataatttttctgcaatttattaaatgccaatgacttccaatgtctgcttttcatgactgcacacagtttaaagctgtagatatctaatgggttatttttcagcccggcatggtggctcacgcctgtaatcccagcactttgggaggccaaggtgggtggatcacgaggtcaggagatcaagaccatcctggctaccatggtgaaaccccgtctctactaaatatagaaaaaattagccgggcatagtggtgggtgcctgtattcccagctactcgagaggctgaggcaggagaatggcgtgaacccagtgggcggagcttgcagtgagccgagatggcaccactgcactacagcctgggcgacagggtgagactctgtctcaaaaaaaaaaaaaaaaaaaaaaagggcttatttttcattgtatatttatgttgtattcaggattttatgcatttaatctctcttcttatgttcaattctgtgttgttgtgtttcttttcttgggggggtatgttttctcagatcagttaattgtatttttgcttttaaagcttgatatcatgagttgaatgataattttttaactcggtacactttatgacaatgtgatatttaatttatatgtgaattagccgtgtttgttgcttatacatatatctatgtgtttttcacctatgtatgtcatttttttcatcttttttccttgtttttttttttaagtttcagatacgctttctttttcttttttttgtttttttcttttaaagagaattttaaaacagagtcaaatgaacaaaaatcagttatttgtcctcttgcagggcgggtagaccttccttccccacgggtttgaggctatggctaagtggtgagccttggggagatgcaggaaggatccatcccaggcacttggctagaggtaagtaaaaatagcctttggaccagaagacctgatagtttgggtactcgtctgaacataagtccccatcttcccagaaatgtcgtcttttgtctgcaacaactggctggagaaatatttcagaaagatgtgtgcctggaacacccaaagacgtacctttcctttctctttggcataggccttgtagcactgtagaaagaccaggtttgcaatggagccttcaatactcttcatccctatggatctcaggggctcatagggtgacaggagaggagacaagctagcttgggaagagtctttgtacttcagcttctcccctactgaaacactatatacttggggccacagttcatcacaaaacacacatgctctctttctttctctcacacccacatcttgggaacccaacaacttgatggcaggtagctctgggtatccttggtctggcattcacccactgggcatctaagctgtcctaaagctcttttcaatcacttctcactctttccaggcccatgtgggtaggtgttccagccttcactctttcaggctgatcatagaggcacagtgtgggaaaatcccctactgtgatggccattgctgggaagcagggaaggttaagggcccactgctgcccaaggctagtgcagaggccctctgctcctccactcatctcctcaaagaatgatatcaggtgcagcagctgctgtctggaatgttatcaaaccaggactgcacaggcactgcattctctgtgtggaagaggtaagaagcaggctagttgtccaggatgagttttcctcaggtccctccccagatggctgacgttcttgacatagcagccctggtgaaacaaacatgactcatgggtcaggcagccccaaaccatcccatacccgtccagctcacccgtcacaggatctgcctacttgttcaggctgggaagaagagagcaatgacgaaaacacatttaaacatttcctccattcatgtcaggaactcatccatataaggcctcatgagcacatggatctggtgcatggtcccctcaagctctacaggcactaggcagtcagcattgctgattggcttaaaggagctatgcacaagggtttcatccaggtcagtgaccatacagatccttccttgatttttctctgtcacctctgggagcaggcaggttcctgggatctgataaaactgatattggagacgctggagctgatccgacatagcaatggtgttgactccctccttatgtgtggattgctcagcgggggaacttgactgtccaacatgctgggtgcaagaacagcagaaaggggacttttaagatgtggcaaacatgaggcctcttcggagaggactttggaaaccaggccttgcttggtaaggaccagggcatcttccctccatgcctgggtgatgatggagccttgttccatctaacaatcctgagggctgggctggggggcatgggctggggcctgattcagttcccgagattctgacctccacagctgttcacataccccttctcctttccatactggtcgggaaggga

SEQ ID NO: 976 - DNA, 5834 bp, Homo sapiens
tttggcgggatctgtgtctctcgctggtgctggccaggagcttgggatctgtctcctctttcgcctcctgcaccttgagagccctgggtactctgtcacagcccctgttgccctgcgatctgtaggtccttggggagcatagttaaggtgccaggacatcctggaagctgggaaatggtgagtatacggggttcgccatcccgagaggggagagcagactgtgaaaccggcaggaccggcctccccacggttagctccgagtctcccgcagcttggccttcagtcccctgtggctgcaagatggccgctgggccagcagcgaggacccccacatccggcctggccatccggtcctgtccctgggcagcgccctgctctgcgcccacagccatgagtatttcccagattgttcagggaggccagatgggtcatcagggaaaaaccgcgagtgggtgtttgcgtgggaggagctgcggcccgtggggtccccagtctctcttgttaaaaattaacgggagtctatgttaaaaggttcatcagtttatctgaacaaacagtgattggtgaaatggaaagcacccagccatgatttctgggccaccagaggggcataaaggaaaggcttttataagatgcatgagaaagcagcccaaattcaagaattggttccagttatatggtagccttatttgaactatccagatggaaatgtcctggttacatattcagaggttaattgcatgtttgtcatgggttaaacctgcattttgcttcaggctaagatagtgttttataggaaatgtatttgagttaggttttagatttttttttttttttttttttttttaacctatgaacacagggcactagagccactttagactaattttctgatctttaattattttaacactccagaggaggactggttttctcctgtgattttttaatgtatggcaagtggaacctctaatcgaccaccctgtttttcatcctaactcaggcttgcagtaaaattatcagttcccactttctttgctgcattctcaaacgcaacacatgagaccagctttcccttgccaatttacaatgctgttaactatatgtcctttattatacatttcattaaagttttctattattgggtttctttctacttctccctacagttctggcaatatttgctttttatatttagaagcctcccttttgggtgcataaatatataaagctatattctcttgagaaattaacctctattattgtatggtaaactcatttcattcttgtgagagacattgctagaaagtctattttgtctaatttaagcattaccatttcactcctttggttattatttgcatggaatatcattttctatcctttcacttttagcctatgctcttaattcataattgagtctcttgtaagcagcatattatgaggtttaaaagattaatttatccactctgtctgctttagtctcttttggctgctataacagaatatcacacactggtaattaataaagaatagaattttatttgactcatgattctggaggctgggaagccaaaacaacattatactggtatatgttgaaggtctagttgctggataataacatacacaaagatgtgagggagagagagctttttttttttaatatataacagatccattcttgttataattagcccattcccataataagaacgttaatccattcatgagggcagagtgcttatagcttaattaatttttaaaggttccacctcttaattctaacatgttggctattaaattttatcctaaattttggagatgacattcagtgtacagcagtatctgtttagtagatactttaatctttttatttgtaaggtagtgataggtaagcagttactattgtacatttgtagttttctgtccattttaagtttgcttcttttttttctggttctgtctttcctgtggtattgttcatttttgttgagacaaagttatgctttcttgctcagactgaagtgcagtggcatatcacagctcactgtagccttaacctcctgggctcaaataatcgtcccaccttagccacccaagtagcttggactgcagacatgtaccacaacacccaaggagatttgattcttccaccttgacctcccaaagtgttggaattataagcaggagacaccatatccaatgtgtaatttttgttgtttgtgtatgctttaattactttctctttttctttactattttttttttcctactggttatcatgagacttatgtaaaacatcttgtattttaatagtctagtttaagatgataacaatttatagtattctgaaattcagtatgtatttaccattttagtgacatttatactttagtatttttcatattgttagttagcatttcatcatatcaatgtgaagatttcttccagaccatggctggagaaggaaagaaggtgtgttttgcctgattcagggactatagagagaaccaagttctgcaggcctgtcacctaagtctcaggtgagtatgaattctcttgtgttttccacagactgttgcagtgtcaggaccaaggtcaaatgagttatagccaagtctacagtaagatgtggcagtattctgttttgaagcgaggaccatgattggcaagcttgccacttggtcaagtgcttaccctctaaagatgtcttccttggtctttgcctccagctgggtgtcacaaactctgaactggattccaaggctttcatgaatgcacttatgtttgctgtggcagctgcattatgtcgtgggggatgtggatgcagaacctcccattctgtcgtcttgcttatgttactctcctttatgtttcactttctcaaatgaatgacaagcaggtgattttcagattcaaaagttctaaaataaattgctcaaatttacacattatgtaagctgttaataaaatttcttgtaggtgctacatatttattaaaatttttggttgtaattttaagctcactgtaggcagaaaggaatcattaagatttctattcttttttagtctgtatctaaatgaccatatattttaattccaaatatttactttatacttcagtaatgctcattgtattttgcaaaatttatattgttcttttatttgaaaatataaggctttttttagctcctgaaatctatattatagtcatatagttttattatagtatttgataagaagagcagcaacatattgagaacagaataaaattctgctgtctttttaatgattatttattaaattcttctcattaaagcctattattaatgattgtaatgtatttactgtataattttactgcaatttattaaatgccaatgacttctaatgtctgcttttcatgactgcacacagtttaaagctgtagatatctaaagggttatttttcagcccggcacggtggctcatgcctgtaatcccagcactttgggaggccaaggtgggtggatcacgaggtcaggagatcaagaccatcctggctaacacggtgaaacccagtctctactaaatatagaaaaaattagccgggcatagtggcgggtgcctgtattcccagctactcgagaggctgaggcaggagaatggcgtgaacccagtaggcggagcttgcagtgagccgagatggcaccactgcactccagcctgggcgacagggtgagactgtctcaaaaaaaaacaaaaagggcttatttttcattgtatatttatgttgtattcaggattttatgcattaaaatctctcttcttattttcagttctgtgttgttgtgtttcttttctgggggggtatgttttctcagagcagttaattgtatttttgcttttaaagcttgatatcatgagttgaatgataattttttaactcggtacacattatgacaatgtgatatttaatttatatttgaattagctgtgtttgttgcttatagatatatctatgtgtttttcacctatgtaagtatgtcatgtttttcatcttttttccttgtttttttttttttaagtttcagatatgctttctttttcttttttttgtttttttttttttaaagagaattttaaaacagagtcaaatgaacaaaaatcagttatttgtcctcttgcagggcggggagaccttccttccccacgggtttgaggctatggctaagtggtgagccttggtgagacgcagaaaggatccatcccaggcacttggctagaggtaagtaaaaatagcctttgggccagaagacctgatagtttgggtactcgtctggacataagtccccatcttcccagaaatgtcgtcttttgtctgcaacaactggctggagaaatatttcagaaagatgtgtgcctggaacacccaaaggcatacctttcctttctccttggcataggccttgcagcactgaagaaagaccaggtttgcaacggagccttcaatactcttcatccctatggatctcaggggctcatagggtgacaggagaggagacaagctagcttgggaagagtctttgtccttcagcttctcctctactgaaacactatatacttggggccacagttcatagcaaaacacacatgctgtctttctttctctcacacccccatctcgggaacccaacaacttgatggcaggtagctctgggtatccttggtctggcattcacccactgggcatctaagctgtcctaaagctcttttcaatcacttctcactgtttccaggcccatgtgggtaggtgttccagccttcactctttcaggctgttcataaaggcacagtgtgggaaaatcccctactgtgatggccattgctgggaagcagggaaggttaagggcccactgctgcccaaggctagtgtagacaccctctgctcctccactcatctcctcaaataatgatatcaggtgcagcagctgctgtctggaatgttatcaaaccaggactgcacaggcactgcattctctgtgtggaagatgtaagaagcaggcgagttgtccaggatgagttttcctcaggtccctccccagatggctgacgtccttgacatagcagccctggtgaaacaaacatgactcatgggacaggcagccccagaccatcccatacccgtccagctcacccgtcacaggatctgcctacttgttcaggctgggaagaagagagcaatgacgaaaacacatttaaacatttcctccattcatgtcaggaactcatccatataaggcctcatgagcacatggatctggtgcatggtcccctcaagctctacaggcactaggcagtcagcattgctgattggcttaaaggagctatgcacaagggtttcatccaggtcagtgaccatacagatccttccttgatttttctctgtcacctctgggagcaggcaggttcctgggatctgataaaactgatattggagacgctggagctgatccgacatagcaatggtgttgactccctccttatgtgtggattgctcagcgggggaacttgactgtccaacatgctgggtgcaagaacagcagaaaggggacttttaagatgtggcaaacatgaggcctcttcggagaggactttggaaaccaggccttgcttggtaaggaccagggcatcttccctccatgcctgggtgatgatggagccttgttccatctaacaatcctgagggctgggctggggggcatgggctggggcctgattcagttcccgagattctgacctccacagctgttcacataccccttctcctttccatactggccgggaaggga

SEQ ID NO: 977 - DNA, 105 bp, Homo sapiens
ggagactaaggcaggagaatcacttgaacctgggtggcagatgttgcagtgagccgagatccttccactgcactccagcctgggtgacagagcatgactccatct

SEQ ID NO: 978 - DNA, 541 bp, Homo sapiens
ttttttcaagttttattttaagttcaggggtccatatgtgataaagtttatttttcaacttctattttaagtttaggggtccatgtgcagactatgcaggtctcttacatacataaatgcgtaccactgtggtttactgcacagatcatctcatcacccaggtaccaagcccagcatccgcagctattcttcctgatgctctccttcccctcccccatgccatgaaacaggtgtccagtgtgtgttgttcttcctgatgtgtccatgtgttctcattgatctgcttctgctaataagttagaataataataggcggtgtttggttttctgttcctgcattagtttgctgggagtaatggcttcaaattccaaccatgtccctgcaagggacatcatctcattatattttatggcttcatagtgttccatggtgtatgtgtaccacatttcctttatccagtgtatcattgatgggcatgtagattgattacatgatgttgctattgtaaatagtgctgcaatgagcatttgtatacatgta

SEQ ID NO: 979 - DNA, 105 bp, Homo sapiens
ggaggctaaggcaggagaatcacttgaacctgggtggcagatgttgcagtgagccgagatacttccactgcactccagcctgggtgacagagcaagactccatct

SEQ ID NO: 980 - DNA, 564 bp, Homo sapiens
agagaatccaccagaaacacatttttttttcaagttttattttaagttcaggggtccatatgtgataaagtttatttttcaacttttattttaagtttaggggtccatgtgcagagtatgcaggtctcttacatacataaatgcgtaccactgtggtttactgcacagatcatctcatcacccaggtaccaagcccagcatccgcagctattcttcctgatgctctccttcccctcccccatgccatgaaacaggtgtccagtgtgtgttgttcttcctgatgtgtccatgtgttctcattgatctgcttctgctaataagttagaataataataggcggtgtttggttttctgttcctgcattagtttgctgggagtaatggcttcaaattccaagcgcatgcctgcaagggacatcatctcattacattttatggcttcatagtgttccatggtgtatggtaccacatttcctttatccagtgtatcattgatgggcatgtagattgattacatgatgttgctattgtaaatagtgctgcaatgaacatttgtatacatgta

SEQ ID NO: 981 - DNA, 105 bp, Homo sapiens; identical to SEQ ID NO: 977

SEQ ID NO: 982 - DNA, 1643 bp, Homo sapiens
ggacgaccccaccaactcctggtatcacgcacagaacctgagtggaccccacttacagcagcagccgcctcagccagccaccctgcaccatgcctctcccgggcccccgcccaaccctggggctgtgtactgagcacccatctggcctgcacccttgacaaaggaccccaggaccaggcagaaggcgcctccgtcctagccactcaggaatcatcgaggagcacagggaaaaggaactccctttccccctcccttgccccttcctccagggacccaagcgcttccagatgacaattgcatggaccaaggatgccccctgaacctccctccctctgcctagacactggggtacccctccagatgtggggacattccaccccagtggggacagccattcccctacctgctccaggagcctggattggctttaaatggctcatcatcttccagcttcttaaacttagtgcctgttcccagactggagaccttgggatgggggagagtgtggagggtttgcgggtcctgcctgtgctggggcacctggcaccgtggatcttaaaacttgccaggcctagttcctcctgagcctctggtggtctccccctgctcgagcggcccctcggccaataagacagtggacatcatgacgaggactccgggtggggacctgaactggtcaccgccctgcacttctagccctcatttaagatttgagggtgaaaccaaagaaaaccccctaagtgagggaatcttttaatatttgtggctttagaggaaagaactaaaggagccatctctctcccctctcctccgttccgagaggaggggtgggtctcagacgtttttcctatggacttatttcttccatgtccaggactttgcacaactttggttttaaaagctgttgaaaaataggaaaacaaagggcattgttcacagatagggccaagtctccccttgcaagggtgcctctgttctgtccctgcccccacctcaccttctctactcctccagtaagttggcagttttggtgccaaaccccaaatctccaaagagacataccaggcaagacaaacccccaaacacctcctttccggtggccttggaaacagattgctccgagctggagaatgtcgggtgaggtgtatgggagaggaggggagagttagaacttgtgcctttgggagtaaggggtaactgcctggagggctggtggcactgcccctccctgacccagacatcccaccaaagctaactttcccccacccctgatgcagtaaaacattgaaaaaaaaaaaaaaggagaggtagaagactgtagctatatatataaatatatagtaagttttttttttttaagagcaacagagagaagcagcctcctccctgctgcggtttcctatttatgtggccatgttcctcctggacggatctccctgtgtgtttcaagctgagagatgtgggctccggctggatttgggttttgtgggaggtgcaggggccaagagagacgtggtaggtctccaagagtcccacccgggggggaagaagcaaagccatctcccaccccctcccagccttctcatttctgctttcttactggactcatctttatatataatgttaataaaaaagacgaaaat

SEQ ID NO: 983 - DNA, 766 bp, Homo sapiens
caccaggagggtcggagggcattcttcgatcccaaagataatagggctgaggccaaggagaccgttgcagtccccctggccaccttctgggtcatccagggacctcctcatggcagtttgcctctctgggtccaagggcaagctgtaagtggtctctgaggtcctggagccacagcttgggaaggtgttgatgggcagggtggattctgagggcttccctctggagaggaagcatgtgatgagaggtgtagacagggtcaggctgggacagaaggaaggaaaggggcagagctggggggagggggaggaagcgatcatatggggagtgtctggcaagagtagactggccagtctagggagtgcagcggggagaggggaaagggagaaagtacagaagacagatgaaggagaggaggtaagcgagaaaaaatggaaaggggagccggaaatggaggagagaggacaagcaaagagacagaaatgaagacatgaggaaaagctgggggaagcaggagaggaagggacgggatgtaggagggggaagaaaaatcggagatgagacaaaagaaatgtgtgggagacgggtagagacgaaatgcaaggggcgtggttttggtttttctccaagacctggagacatcgacccccatcgccttctgaagagagagggagggcgggcactgggggtcaggagagtctccagcaggggaggggaattgtttggactattgttcttcaggattggaataaaacaatcttattttgg

SEQ ID NO: 984 - DNA, 419 bp, Homo sapiens
  SITE (369): n equals a,t,g, or c
caccaggagggtcggagggcattcttcgatcccaaagataatagggctgaggccaaggagaccgttgcagtccccctggccaccttctgggtcatccagggacctcctcatggcagtttgcctctctgggtccaagggcaagctgtaagtggtctctgaggtcctggagccacagcttgggaaggtgttgatgggcagggtggattctgagggcttccctctggagaggaagcatgtgatgagaggtgtagacagggtcaggctgggacagaaggaaggaaaggggcagagctggggggaggggggaggaagcgatcatatggggagtgtctggcaagagtagactggccagtctagggagtgcagcgnggagaggggaaagggagaaggacagaagacagaagaaggagaggaggtaa

SEQ ID NO: 985 - DNA, 766 bp, Homo sapiens; identical to SEQ ID NO: 983

SEQ ID NO: 986 - DNA, 1614 bp, Homo sapiens
gagtcttgctctgttacccaggctggaatgcaatggcacgttcccggctcactgcaacctccacctcccaggttcaagtgattttcatacctcagtcacctgagtagctgggattacaggtgtgcgccatcacacctggcaaatttttgtatttttagtagagacggggtttcaccatgttggccaggctggtctcaaactcctgacctcaggtgacctgctcgcctcagcctcctaaagtgctgggatcacaagcgtaagccactgcgcccggcctaggaggcttctaataaagattctatcactcctaagaaggcctagagacatgatcaggcctagacctgctgatgattaccttggtatggtgtgataatgaagtccacactgaggatgacagagctgagatgaagaaaatctggatctttgcttggctcagttgagtctctcgagtctgctctaccatggggcttcttaagtaaaatatatccttttttgttagagacagtgtctcgctctggcccaggctggagtgcagtggtgcaaacatagctcactgcagccttccagctcttgggcccaagggatcctccagctcagcctcctgagtagctaggactataggctcgtgctaccacctagctaatttctttttcttttcttttcttttcttttttttaactttttgtaaagatgaggtctcttgctacgttacttgggctgttctcaaactcctggcctcaagcgatgcccctgcttcagcctcccaaagtgctagaattacagatgtgggccattgcacctggccaatcaaagataccctaatgatttagggaagtttgagttggggtttctgttgtcgcaactgatgaaggggatttaattctattataggtgacaaagtccaggttgaagtagctcagcatttttcaaactttagcgtggacgtgagtcacgtgggcaccttcttaaaatacagagtctgactcagtaggtctaagatagggcccaacattctagcaagctctccgatgatgtggctgtgctgggttgtggagcacactttgagtagcaatgaaggaacttgagataaaagacaattcaggccgggtgtggtggctcacacctgtaattccagcactttgggaggctgaggtaggtggatcacttaaggccaggagttcaagaccagcctggccagcaaggcaaaatcctgtctctactaaaaatacaaaaattagccagatgtggtggcgggtgcctgtagtcccagctacttgggaggctgaagcatgagaattgcttgaacccaagaggcgcaggttgcagtgagccaagatcgtgccactgcactccagcctgggtgacagagcgagactctgtcaaaaaaaaaaaaaaagaaaaaaaatgattcagtggttcaagtcatgcgaagtcaaaggctttgatggcagctgactgcaggggctcaaacaatgtcaggtttcccctctctcgcctgcttttcgtgcgatggatttcttcaaaagacagctctctcctgagaaagggggggactagaagttcccatatcacaccctcctatcttgatccaaaaataccattctatcagcattc

SEQ ID NO: 987 - DNA, 1614 bp, Homo sapiens; identical to SEQ ID NO: 986

SEQ ID NO: 988 - DNA, 793 bp, Homo sapiens
ctttcaaccttcagatgaaagaagcaggtctagagaagtgttgcttccttcactctgatccaaatggggagtcaaccaggcaccagggctcaatcaacagcaataaacatcactgtctgaggtcaactggcttgctcagctctctgttatcaggcactgccaccagcagcacttctatcagagtgggagctcctcaaggttaaaggcatttgagaagggcttaccaagagtccagacactagacaaagttacttgtgcagtctgctttcagacactgggaatgaagtcttcctccctaccaccaaacttggggggaaaaaacaaaaaaaaacctctaatccaatccttggtctgcaggtaagctaaagtgcagattcctgaggaggatcacagaaacttcagtactctggtctacctttcagtgtgaatgagttccagccctattcttgaaaattgttattggaacagagcaggtaggccctgaggcatattgaagggagttaatgattatggagtgatgcagggtgcctgacagcattggacaggagggtatgttttctcatgttggtctcacaataactatgtagagccactcttacccccattgtacagatgaggaaactgttgccttaaaatacaatttttttgtaataaagtcatgctaatttgtttacatattgtctatagttgctttcactggcaaaacctaaaatgtttactatctggccctttctagaatgtttgctgaccttgttctgaattcttcaagctctaaatttacctctgtagagaa

SEQ ID NO: 989 - DNA, 793 bp, Homo sapiens
ctttccaacttcagatgaaagaagcagtctagagaagtgttgctcctttcactctgatccaaatggggagtcaacaggccacaggggctcaatcaacagcaaataacatcaactgtctgaggtcaactggcttgctcagctctctgttatcaggcactgccaccagcagcacttctatcagagtggagcttcctcaaggttaaaggcatttgagaagggcttaccaagagtccagacactagacaaagttacttgtgcagtctgctttcagacactgggaatgaagtcttcctccctaccaccaaacttggggggaaaaaacaaaaaaaaacctctaatccaatccttggtctgcaggtaagctaaagtgcagattcctgaggaggatcacagaaacttcagtactctggtctacctttcagtgtgaatgagttccagccctattcttgaaaattgttattggaacagagcaggtaggccctgaggcatattgaagggagttaatgattatggagtgatgcagggtgcctgacagcattggacaggagggtatgttttctcatgttggtctcacaataactatgtagagccactcttacccccattgtacagatgaggaaactgttgccttaaaatacaatttttttgtaataaagtcatgctaatttgtttacatattgtctatagttgctttcactggcaaaacctaaaatgtttactatctggccctttctagaatgtttgctgaccttgttctgaattcttcaagctctaaatttacctctgtagagaa

SEQ ID NO: 990 - DNA, 23580 bp, Homo sapiens
gagcggcgctctgagcggcctgagcccggcggagccctgcagaacccggccgacctccatgggctgcggggggctgcacccggacccctggggcgcggcgcgcccctgaatgcaccgtgggacgcaggaggtagaggcgcacgaggcggcgcaagagacatcgggagggtcctgagcccctccggggaggaacgcggtcctaggctgagtgggttggggggaaagcgatgctggctgggtcccctggttcgcaagacctcggactgccagggggtggggcctcaccgcgcccctccctctccggttcgggccccgcccctcctcctcctgcgccgggctggggtacccctcctccgggatccggtacacagcgtcgcgcgctccccccagggtgccatggcctcccggctcctgcaccggctgcggcacgccttggccggcgacggccccggggaggcggcggccagtccagaggccgagcagtttccggagagctcagagctggaggacgacgacgccgagggcctgtcctcccgactcagcggcaccctcagcttcaccagcgccgaggacgacgaggacgacgaggacgaggacgacgaggaggctggccctgaccagctgcccctcggggatgggacgtcaggagaagacgcaggcgagtgcaggaggacggaggcgggaaccctggggctcgattaggcctccatcccagccgcgttcccagagcatccagggcgctaagttgatccagctgaaactcccacacttcttaaagcgcctgggccacctcttggctgtgtgaccttgagagagtcttaacccccctctgagccaagttttcccttgtgtcaagtgggagaactcactctcatctcagaattgctgcaggcattaaatgtacagggcttgggatccgaatggaaatgatgtattaacgatattttgagggtggagctattaatttagcccctactgtctgccaggcacggtgtttggctcctcggtgcctctctgtccctcagtttccatttctgtaaaaagggggtaagtcctgcctcacactgggaggatgagtgaggccacgtcagtggttgatgtcgaccctggccctaggcccattgatatgactggtcatgtgtctgcagaacggagccccccacctgatgggcagtggggcagtcagctcctggcgcggcagctgcaggatttctggaagaagtcccggaacaccttggcaccccagcggctgctcttcgaagtgaccagcgctaacgttgtcaaggacccgccctccaagtacgtggtgagtgagggtctagaacccctgggctgtgagtccagaagtatggctaggagcaagtagggaagaccccaacttcctgaggggtctatgtagttataaatggttaccttgtttacaaatggggaaactgaggtcagaaaggggatgtaacttgagcaaatcctcacacaagacttagtttccttgagactgactgaagtggggattaaggaccttcctcttaacctggttttgagactaagagaactggtgtgtgcacttccccacccagcccacaaggtttttgcaaattgtagcaagatgtgagatacagagagacagatgttatctgggtcaaacttgagatccaagttgcatgggctggtagttaaggaaataggctttcgatccagaccaatcttgactcccacttatttccagttgtttgactctgggtgagttgtttaaccttggtcatcttccgtttcctcattatagcaatggggaaaatgcagaagattacagcaggagttaaatgagacaatggacaaaaagcccttagcagtgtgcctggcattatgacgtggtcaatgaaatggtagctatgtcatcattatttaactttgggttgaaaatgtttgtcatctagggcctgctgtgtccttataacgcacaggtcaatcagttctcaagcacccgaccttgtccctaagggctagacttagagggttggtggaggttaggatgaagagcaatgttggggaggaccttggagtcccttgctgttttccttgctgttgagagactgacttggagaatgaggtctgctcctttaatgcccacagcgactcctgctccagtcccttttcaggccaggcctgaaagccagctgagctggccactcctgtcagtggcagctctccatctctcactcccctcctcttcaccacccttctccacctctgactcagcaggagggggcctggagcccagtcccacatctgggcctctccacccttttctgttgctgttagtaagcaagggccacacccatggggtgactactccaatttcagcagggaccgactccgattattgagtcttttaaaaaaatttttgaggccgggcgtggtggctcacgcctgtaatcccagcactttgggaagccgaggcgggcggatcacgaggtcacgagaccatcctggataacacggtgaaaccccgtctctactaaaaatacaaaaaaatagccgggcatggtggcaggcgcctgtagtcccagttacttgggaggctgaggcaggagaatggcgtgaacccaggaggcagagtttgcagtgagccgagatcgagccactgcagtccggcctgggcaacagagcgagactccgtctcaaaaaaaaaaaaaaaaaaaaaaaaaaattttgagacagggtctcgttctgtcactcaggctggagtgcagtggtgcagtcataactcactacaacctccaactgggctcaagctatcctcccacctcagcctcccaagtagctaggactacagctgtgcaccaccacgtgtggccaatgatgaagtctgaagtggcaaaggtctcagaactctgggttcatacactggaaggggacaccaaggaatagttcagaggctgagaggaatgggggtgactgtgggtacctggatgggaagggatgacaagatagagcaggatggccaagtatgccccggcctgtgtctggagaagcaaggcacctcctgtgtacaatggggaccctaattccccactcaacttgtgggggtgaagagcacaggctttggaatcagatcaacctgagtttaaatcccagctgggctgttttccagctgtgtgacttacggcaagtctttgagcccttttccccctctttgagcctgcttcctcagctgtcagagataaggaccttccttgcagtgctgttgtgatgattaaatgaaatcacagatgtaaagagtgcttggtacaacaggaggcacagggtaaatgcttgggtaatggaactactgtcattatcacccatctggctgcatgttacaaggtcaatgagataatggatacaaaatgtaaactagatgaacataaaggcttattatatagaccagtgtgtcctgaagaaaactggtgtcctaaagtgtgtcctgcagaaaactagttccctggaatgttaatagctgtttctaaataaaggttttgcaggcaatatgttttgagaatgcagagttaaatgagaatacaataagtttctttattgttaaagtatttaatccctaatagtgatatacactgtgaatcttcaagaggacagagtaagcaaacctaactgaccaggagtggctagagtattgtcagttccacagaacaaatgtgagagaaagatctggatttggtgttagggtgcctttaacatctaacactggttaactctccttttaaacctgttggcttggcattataggttaatccatattcaggttctcagacctgggaggcggggaacttcgtgatcatcttgttcagtgttttccaaacctcagtcattccaatacctccctgattcttgtcctatctaaaaatgccacttgtgtccttttcttcttaacatttttctttaaatgaacctatttttttttctttatctttttttttttcttttttgagacagagtcttgctctgttgcccaggctggagtgcagtggtgcaatctcagctcactgcaacctccacctcctaggttcaagcaatcctcccgcctcagcctcctgagtagctaggattacaggtgcccaccaccatgcctggctaacttttgcattttcagtagagatggggtttcactgttggccaggctggtcttgaactcctgacctcaagtgatctgccgcctcagcctcccaaagtgttgggattacaggtgtgagccactacgcccagccgaacctattttttttcttaaataagtttatcgagacggagtcttgctctgtcgcctaggctggagtgcagtggcgtgatcatagctcactgcagccttgaactcgtgggctcacatgattctctgcctcagcctcctgagtagctgggaccacaagtgcccaactaattctttttctttttctttttcttttttttagagacagggtcttgccatgttgcccaggctggtctcgaactcctggccttaagctgttctcctgcctcagcctcccaaagtactgggattacaggtatgagccactgtgcccatcctttaagtaattttaaaagacaacttcatagcactaccgtacgtggaaagtctcacttgccaccgagagaagctagccataaaaataaaaggtgaggcacggtggctcacacctgtaatccccgcactttgggaggctgaggtgggcagatcacctgaggtcaggagttcaagaccagcctggccaacacggtgaaaccccgacactactaaaaatacaaaaattagccggatgtggtggtaggcgcctgtaatcccagctactcgggagattgaggcaggagaattgcttgaacccaggaggcagaggttgcagtgagcggagattgtgccactgcatgccagcctgggcgacagggcgagactaaataaataaataaagtaaataagtaagtagtgaaaatgaaacgtcattaaatcttgcctagatgttgttgcctgaaggaggccctgacctgagatccactttctgactcttttctaaaaatggagatgagaagtgttagagaagtactttttttttttttttttgagagagagtttcactcttggtgcccaggctcgagtgccatgagcaatctcggctcaccacaacctccacctcccaggttcaagcaattctcctgcctcagcctcccaagtagctgggattacaggcatgtgccaccacgcctggctaattttgcatttttagtagagacagggtttctccatgttggtcagcctggtctcgaactctcaacctcaggtgatccacctgcctcagcctcccaaagtgctgagattacaggtgtgtgtgtgagccactgcaacctgcccaagaagtcctttttttaaaaccaaactgagagctggccaggcgcggtggctcacacctataatcccagcactctgggaggcaaaggcgggcggatcacaaggtcaggagatcgagaccatcctggctaacacagtgaaaccccgtctctactaaaaaatacaaaaaattagccgggcgtagtggcaggcgcctgtagtcccagctactcgggaggctgaggcaggagaatggagtgaacccaggaggcggagcttgcagtgagccgagatcgtgccactgtactccagcactccagcctgggcaacagagcgagactccgtctcaaaaaaaataaaaaaataaaaaaaccccaacaaaaccaaactgagagcttctcaatttgtagtcagaaagattaaaaaacaattaggctgggtgtggtgctcatgcctgtaatcttagcactttgggaagcctagctaggaagattgttcaaggccaggagttcaaggccagccctagcaacatagtgagaccccccctcatctccatacaaaaaaaaaaaaaaaaatttttttaaatagctgagtgtggtggtgcatgcctatagtcctagctacttgggaggctgaggcaggaggaatgcttcagcccaggaggttgaagctgcagtaagctatgattgtaccagtgtactccaacctggccaacagtgagaccctgtctcaaaaaataataattaaaaggggaccaacctcctgatacagtgatatttactctagtgcacaccacctaaaaacctcaggtaccaatacttgtacatgtctcatttttggacaaacactgacttgaccgagcacttccttcactagaaacagaagtggacccagagggggactcccttgcctgggtcacacagagaaggagtagctgacctggggttagaacttgagtcctaggccagtatacttttcacagttatggcagttgtggctatctacagacctgtcctctgggtctagtttggaaaagcctgaccagggatgtggaggccaggtgtccaaagtggaacaagctccaagctggtcctaaaggagccccaagagattggctggggtttcagcttatgtctggttttccagagggggctgtcagaagaactaatgctctatgggaagggagtacaaaaaaaggggcagcagccccgggcactgaagctcatctctgtctttctctcttcttgctgccttgggcctgggtcatttcagacaaacctcaggtaagatgggactgggcttccccgccactgcgcagcagctcccgccctcctgggtgctgtcccaggggtgaaaggaagaggtggggaggtacagctgggagtgtgggggatggggaaggatggggagggaacgggcccgtggacaacttgcatttgccctgacacccaccctccctgcagctctacaccctcgccgtgatcggcccaggaccgccagattgccagccagcccagatctctcgccgttactcggactttgagcggctgcaccgaaacctgcagcggcaattccggggcccaatggctgccatctccttcccccgtaagcggctgcgccggaattttactgcagagaccattgcccgccgtagccgggcctttgagcagtttttgggtcacctgcaggcagtgcctgagctgcgccatgccccggacctgcaggacttcttcgtgctgccggagctgcggcgggcacagagcctcacctgtactggcctctatcgtgaggctctggcactctgggccaatgcctggcagctgcaagcccagctgggcaccccctctggcccagaccgccccctgctgaccctggctgggctggccgtgtgccaccaggagctggaagaccctggagaggcccgggcatgctgtgagaaggccctgcagctgcttggggacaagagcctccaccctttgctggcaccctttctggaggcccatgtccggctctcctggcgcctgggcctggacaaacgtcaatcagaggctcggctccaagccctgcaggaggcaggccttacccccacaccaccccccagtctcaaagaattgctcatcaaggaggtgctggactaacccttgcctagatttaaggccactgtgaggagaggggttgccccagaaggcaggggaaggacctgatgagaacagaatagctgggaggctgcagagggtgctgggagcccctagaagttccaaaagagaatgtgaagcagatcaaggaaacttctgttgagctaggctcagggtgagctttggctggggttgcccttgtgtagtacagggaagtctgacacagcctctccagcctataaacagccggggggctgtggcacaggttggggcaatgttcccttgttggtgggcccccaagctggcaaggcctcttggctgaaggccagggactctgcccctggagtcctggagttaagggatgaaggcaaggctgcaggtctggcccaggggaattaaaagccagccactccagtggtatcagtctctttattggatgtgagggccaaaagggactgtaactcctgtctcaggaatggggatagatgggaggttcttgaagccccaggcgaagctggtacctctggctacagcttgctctctgagacctggggcttcactcggatcacgccctcctgggcacaggtcacagctaggactccatcctgacgccacagccgcccatggaccagcccccgagagccacctgtgggtgaggtgaagggtgatgatggcctgcttcagaacagccaaatacactttttttttttttcctgaaacagagtctcactaagttgccaggctggtctcaagcgcctgggttcaagggatcctcccgcctcagcctcctgagcagctgggattacaggcgcacatcaccatgcccaacctccaagtggacttcttgcaaagggtctggcccagggcagggctgccccacacaagggtgcactgagtgtcgtggctgctccaaatgccccttcatgagcttattatggaccgtcattgaggggtaactcctcccacaggaaccccagttgacagtttaaaagcactttcacacctctcctcgcttcctcaaaaagatcacagagggaggagctctgagaacagtctccttcaacagttcggccaagcagaactgctgtacctctgaccacttgtgttaggaaaactatcggctccctgtataataaatcaagccaggtcctccaagtggtaattcatgaaaaatatccccactaccaccaccaaggggaagaaaggactcagaagagaggacttgaggccatgaggtctggcctcttccctccccatctggagactctttctcccttgctggctttgggcccaagtttgatgtttatgaggatgattgctggtttcccttacacatagcagagctcactcagttctcacagtagccaaatgaagcagttatgtgttgtccagttttccagaccaggactgaaatccagagagggtcaggaatttggccccatgatgaagccaaatctgaacccatgtcctcacttcaaggttatcaatcttggattgtgatgctattggtacttgagaataccccttatctgagtataaagaatccttgagttttgtccttggtttatcaagcaaagcttttcttcatttgaaatgtactcccttggaaaggaggtcagggttctgaagctagacattgatgaacgagtcttgtttctctcccctgcaaggaaggtccaagcaggcccttagggaccactgaatgccccgatcccaatcaggttaatcagaatcacttagagaacttaaaaatacagtttcctggaccttatccaagacctactgagtgagaatcttgagggtggaatcagaatctattttgaaaaggcatccccaaatggcagtctgatggactgcgggtttggataccactgctgtaatgtaaccctctttgtttagatgaggaaactgaggttcagatggaagatatgatttgcctattgtaatacaaagaatctgaactggttttgggactagaactgggtccctgggagaaggtgaatcacatttccagcacattctagaaatttagagcagagcaggtgtcccggcctcaccctctcattttgaagatgaagatgccaaagcctgggagggaaggaaaggaagtgacctgtgcagcgccacacaggaagtcgggaaatcagcatcacccaagaaagcaggctcctgccactcaaggtcagtgcccttgtcccacacggccccacactcaccggcccaggggctctcgcattcatagagcatccagtggtcagctcggaagggggcgtggaaccacatggaatggtccagtgagaccatgaagtgcaccttgtgctgccactggtgaggcagcagtgcagtgcccaagaaggcatagtcggagatataggcggccacgcagcagtgcatcttcatgtcgccctcgcctgcaacaggtccccatcagccctgggctcctgggctttccagctcaggacctgcacggaggtagggggaaaagggactcccgtgcatgggtgtgcagactggttgctgcacaagagcgcttggcctacagtgtgtgtgtgtgataggggagaagtgagatggcgacttggggagggcaggggtgagcagggactgaaattcagtcttcaccacccaagtctcccactctaggccccaaaaggggtgtcttcttccaatttgcacaaagatactttatagttagcagcaaagctggacaacaaccccagcgaggtgccttttgccttcctcagaaaggccttgtgtcgggattatagtcatctccaccttctccccatgcaaagggctgagagggcccaggtgagaagctaagccaacttccccatcatgcagataaggaaacaggcccagagaagggaactcatgtgcccaaggccacacagcaaatgagtggtagaccccttggagagtggtttcctcccatccatggggtactcttaccaatatagccccgggctcgcacccagaacatctgtttgggctccattctctgcagctggctcaggggggatgggtttactggcttgatctcaatggggacctcctgagcagcaattcggttgagcgccaatgggtacctcttttggaggttagggtccctgaaagtaaagggaagagggtcggggtgagacccaggaagagagggagtcacatctgcattgcctcttctgactcccctcattcttccacagggacccctgatatccccaaagctcccctcccctgtggcaggcaggatagtgcagcgtttgaatcccttcttggccacttacgagccatgtggtctcgtgctaattagtaatctgagtctattttcccatctgcaaaatgtggataatgatagtaacctacctcataaccaacactgtgaagacaagatcatgaatatctaaccaacacatcatagtaataaggcataccctgtaatatgcactgttctaagcattgtacatacaatagtattcctcacaacaaccctgtgagataggtactattatcacccccatttcatcagtgaaataagcacagagtccaggtagcttgcttaaaaattggagagacaggatttggactcaggcaatctgggtccacagtatgattattttctatttttttagagacaaggtcgtcttctcacccaggctggagtacagtggcgcaatcagctcactgcagtctccaactcccaggctcaagccatcctcttgccttggcctcccgagtagctgggactagaggtgtacgccactgtgcctggctaacatttttattatttctttattttgagacggagtctagctctgtcacccaggcttgagtgcggtggtgcaatctcagctgactgcaacctccgcctcccaggttcaagtgattctcctgcctcagcctcccgagtagctgggattacaggcgcctgccaccatgcccagctaatttttgtatgtttagtagagatggggtttcactgtgttggccagggtggtctcgaattcctgacctcatgatccgcccgcctcagcctcccaaaatgctgggattatttttacttttttttgtagagatggggtctctttatgttgcccaggctggtctcaaaatcctggccttaagtgatcctcctacttcagcctcccaaagtgctgggattacaggagtgagctgctgtgcccagccacttcattattttaaacactcaagaaacaggctgcctgacttggcctgagttaccaaaccctacacagtagggaacattgcatccccccagggggaggagcccattccaaggaactcccttcaatacagtgacaaccacccatagtgctctgcacaggtcctgccattttcacccctatcctctggagtgctgttggacagaacctcctatgatgatggaatgcctatctgcacagcacactatggtagccactagccacatgtgactatggagcacctgaaatgtggctaatgcaactgaggaacagaattgttcattctactgactttggtttttttttgtttttttttttttaagacggaatctcgctctgttgcccagtcaggagtgcagtgactcaatcttgcttactgcaacctctgccccctgggtccaagcgactctcctgcctcagcctcctgagtagctgggattacaggcacgggccaccacgcctggctaatttttttgtgtgtgtatttttaatagagatgaggtttcaccatgttggccaggctggtctcaaactcctgaccttgggtgagccacccgccttggcctcccaaagtactgggattacaggcatgaaccactgcgcccggacctatttaattttaattaatgtaatatagccacgagtggctagagactaccttattaacagcacagatctaaattcaaggtcctttaacaatgtcttcctttcatttcagcaaacatttgtcgaactgcaaccacacaccaggccctgtgttttttctgttaatagtgatataactacaattcactgccattgtgctagttagtactagcacgctaagtgccttttctctcttatttaatcctcacagcagccttatgaggtaggaatatgattagcaccattttataatggtgagtactggctcagagtgggaaagcaacttgcccaaactcacacagctagtagggacaaaatctagaattgaatccaggcctttcaggttcccaaacccacatccatcccgtcatactctgctgcctccccagtatctaacacgagatagagacattctctccttatgatacagctaagaagtaggcagggcagaaatgagcattcccattttttagaagaagaaactagggccctggggagttgggcactgtcccacagcaggtgagcattcacagaggcacagccctggacagaatccatgtgtctatcctttgtctggacccagagctctttcccctgtaccagcatttttcaaacttgattaggtgtgatccaaataaatatattttaccaggtattcaaaatatctaacatgctccctggtggtctaatggttaggggaaaatacatatttgtatttttgtacatatgttttatatacataaaacatgtggccgggcacggtggctcacgcctgtaatcccagcactttgagagaccaaggcaggtcgatcacttgaggtcaggagttcaagaccagcctggtcaacatagcgaaacctggtctctactaaaaaaatacaaaaattagccaggcatggtggcatgtgcctgtaatcacagctgcttgggaggctgaggcacgggaattgcttgaacctgggaggcagaggttgcagtgagccgagatcatgccactgcactccagcctaggcaacagggcgagactctgtctcaaaacaaacaaacaaacaaaaacatgcactaatgcaaaggcagtgaccaaacataggccatagcgctgcagctctccagaggacactcactcctggtgtgcattaagtcctaagttgctggaccaggggcctgggggagagagggaatcacttagggggctggggaggtggtacttaacaagtggttacggaagtatttctatatacatatatatataaaatatatatatggttttttttcccaggtatggtggctcatgcctataatcccagcactttaggaggtcaaggtgggtggatcacctgagatcaagagtttgagaccagcctggatagcatggtgaaacgccatctctactaaaaatacaaaattagctgggcatggtagcaggtgcctgtaatcccagctacttgggaggctgaggcgggaggatcacttgagtctgggagtcagaggctgcagtgagccgagatggtgtcactgcactccagcctgggcaacaagagcaagactccatctcaaaaacaaacaaacatgtatatatataaacaacaacaaaatatatattctttttttcttttttcagacagagtcttgctcttgttgcccaggctggagcacagtaacacgatctcggctcactgcagcctccacctcccaggctcaagtgatccccccgcctcagcctcccaagtagctgggactacagacacatgccccgacacccggctaatttttgtattttttatagagacagggtttcaccatgttgcccaggctggtcttgaactcctgggctcaggtgatcctcccacttgggcttcccaaagtgttattataggtatgagcccccacacccagccccagccttatttttaaattagagatggagtcttgctatgttggcgaggctagtatccaactcctggtctcaagcaatcctcctgccttggcttcccaaagtgctgggattataggtatgcgccactgcacccggccaagcccttcattttataccatgacccagtacagacacacaccagaaacacacatgactaaacctcaagtttcacaaaaggattcttgcccttaatacatacatattattcactccagtatcttcttttctaatctgtattttaaaaatgctggtcaagacccactaaaggattctatgacccacaaacagatagcagctgcattttgaaaagtctgccatggagcctccaggtctctcaccttaaatactggtcaatgagggtctcacagtcaagcagctcttctggtggtggcacagtgggcatggagaactggtgctgcatggggctgggctgggcctgctggaaggaggcctggcagatgaagatgggcttcccatgttgcacggccttcacagagcgcaccgagaagctcgaccctgttcgtgtccgctccacttggtacagtactggcagcttcgggtcccctgcagtgggcacaaggacacagtgggtccacaggccctgtcatcatcacaacgcctgacaggcactctactactcatcttccattccatttcatctcagtgactactaactgaggtctgctaaggtccaggcccagggatacagagaccaccaggccctgtcatcaggcttctccctgtgcaggtggagcttttctctaacagcacaaacagcagagacattgacagattccttgcattcaaatcctggctccaccactcaccagccgtgtgacccttcacttctctgagcagtgtgcttatttgcaaactggggatcatcatggtgctcatcgcttacaggattttaatgataatgaaatgaatccgtagttgtaaagtgtttagaataatatctggcacatagtgagggctctatatgtgtttgttaaataaaattaatactccttgcttctatcttgctccatctatgcctgggatcttgtcatcagtccaaaaccattattctagatcagggagcagtaaatctagcctgcagcctgtttactgtttattctgttgttgttttcttttttgagaacaaacaaaggctatttattcagcgcttgttcttttttttgtttgtttgagatggagtcttgctctgtcacccaggctggagtacagtggtgtaatctcggctcactgcaacctccacctctcaggttcaagcgattcctgtgactcagcctcctgagtggggggggactacaggggtgcatgaccatacccagctaattttttttttttttttgagagacagtttcgctgggtcaccgaggctgaagtgcagtggcgctatctgggctcactgcaacctctgcctcccaggttcaagccatgctcatgcctcagcctcctaagtagctgggactacaggcgtgcgccgctacacccaacaaatttttgtattttttgtagagatggggtttcactgtgttgcccaggctggtctcaaactcctgacctcaactgatccacccaccttggcctcccaaagtgttgagattacaggcatgagccactgcgcccagccaatcagagcttgttgtagcaggaagtcaaccaccatcacttgcttttggcagagacttagaggcaggcaaaggaatgggaatgctctgtagtggaaaaaaaggcttcagggatgctcccattgcaggctgttggcatggggaagctgttggtgggctaactagaagcatgacacctggctgggcacggtggctcacacctgtaatcccaacactttgggaggctgaggcgggcagatcttctgagaccaggagttcaagaccagcctggccaacatggcaaaaccctgtctctactaaaaatacaaaaaattagccaggcctggtggcacacacctgtaatcctagctactcgggaggctgcagcaggagaattgcttgaagctgggaggtggaggctatggcaggagaactgcttgaacctgggaggtggaggctgcagtgagccgaaattgcaccactgcactccagcctggggaacaagagtgaaactctgtctcaaaaaagagtgggacatcctatgtgattggttaggagtacatatttggctttctccggttggtcctaagttggaagcaggggcaaaaattagggcagctatcagttattaatcaagtcctggctttggaggccaattgttacagtggtcattatttggcttgctggactggttggtaaagatagtggtctgacttcctacaagtctgacttgtggatagtaggctggcttcctgtgctggttgctgctattgtgcgtcagagttctgtttttctacatggtctagccattgtctgtttgtatattcagcctctcccaggcaagggccactgtcagtcacttcacccctgatgtatatggaagccatttggtccttcactgtcaggtgtctctgctccaaagcagagtggaagagcctaggcaacacagggagaccctgtttctacaaaaaataaaaaataaaaattagctggacatggtggcatgtgcctatagtcccagctaatcaagaggctgaggcggaaggatcacttgaggccaggagatcaaggctgcagtgagccatgactgcgtcactgtgctccagcctaggtgacagagcaagaccttgtctcaaaaacaacaagaccaccaccaccagagtagaaggcactggccagggataaggcagccaacaacaagcaggtgagggaagatttggagaggaagagaacttccctggtttccctgaagttctcactttgtctgagtcaggctgaccttgaggaaccctgacatctgggccatgagacatcttggggatgactttcaaccttcagatgaaagaagcaggtctagagaagtgttgcttccttcactctgatccaaatggggagtcaaccaggcaccagggctcaatcaacagcaataaacatcactgtctgaggtcaactggcttgctcagctctctgttatcaggcactgccaccagcagcacttctatcagagtgcgagctcctcaaggttaaaggcatttgagaagggcttaccaagagtccagacactagacaaagttacttgtgcagtctgctttcagacactgggaatgaagtcttcctccctaccaccaaacttggggggaaaaaacaaaaaaaaacctctaatccaatccttggtctgcaggtaagctaaagtgcagattcctgaggaggatcacagaaacttcagtactctggtctacctttcagtgtgaatgagttccagccctattcttgaaaattgttattggaacagagcaggtaggccctgaggcatattgaagggagttaatgattatggagtgatgcagggtgcctgacagcattggacaggagggtatgttttctcatgttggtctcacaataactatgtagagccactcttacccccattgtacagatgaggaaactgttgccttaaaatacaatttttttgtaataaagtcatgctaatttgtttacatattgtctatagttgctttcactggcaaaacctaaaatgtttactatctggccctttctagaatgtttgctgaccttgttctgaattcttcaagctctaaatttacctctgtagagaaaaactaaaaacaaaacaaaaacccaactaattcacattctttcctgggcttttagaaaaagaactgatttgataaatggccaaggaccaaccctccccctcccccataacatcttttatttttaaaatgtaattgaaacatctcttttttgttttgtttttttgagatggagtctcgatctgtcgcccaggtgggagtgcagtggcgcagttttagctcactgcgacctccagccgccgggttcaagcaattctccttgcctcagcctcagcctcagcctcccgagtagctgggatcacgggctaaggtcaccacgcccagctaattttcctttttttttttagatggagtcttgctctgtcacccaggctggagtacagtagcacgatctcagctcactgcaacctccacctccagggttcaagcgattctcctgactcagcctcctgagtagctaggactacaggtgtgcaccaccacacctggctaatttttgtgtgtgttttttttttttagtagagatggagtttcgccacattgtccaggctggtctcgaactcttgacctcagccgatctgcccgcctcggcctcccaaagtcctgggattacaggcataagccacatgcccagccaaaaaacagcattggttttaatatctgatatagctggcagagtcacaccacaaacagataagagctctcccctttttgccttgcagccaggaagctcagaactaaaccttgtatgaaactgcaacaatatggcttagccaaattttttgacatgatcgcttctcccaaatcccattactactggcctaatgtcctttgacttttaatattcccataataactaccaattattttagctatcttgcagcctttcaagacacaagcaagggcacaaataattatttttatttatttatttatttttgatggagacaagagtctcgctctgtcgcccaggctggagtacagtagcatgatctcagctcactgcaacctccgcctcctgagttcaagcaattctcctacctcagcctcctgagtagctgggactacaggcacatgccgccatgcctggctaatttttagtattttagtagagactgggtttcaccatgttgcccaggctggtctcgaactcctgagctcaggtgatccgcccgcctcggcttcccaaagtgctaggattacaggcatgagccaccacgcccggccaaataattatttattttgaaatggtggcttggacacagctcatttcacgctgctcctggatgaagactttccaagaaagaggatcttttccccagaacctgggatgggtaccctggcagctctctcattgtttagaattattgcccaagagcgaagcaaagaagcaggaaagagtttggcactcaaagacacataaaccaggttcaaatcctggctctgcctccttgggcactgtgggagctggttccaaacctcttcaggtcccagtttccttaggtaagaatgatggcaggaatgcctgccacccatgtttacttatgaagactaaacaagataatgcacacaactatgctctgtatcatgcaaattttaattattcccataagttaatcatcaaaaactaataatatttatggaaaactagattatgccaagccctgcactagatactttactggcaaagactcattgaattcttccatcacaggatgaagagattcagagttcaagtaatgcccccacccacacaaaagaaaacagccaggtatttcactaggctggaaggattacaatatcaaaaggctggtacttacaaacaaattaaagaaacaaagcacatatttactcccaactagcataaagataagaacctggctgagcccaaggtaagtattcaaatactttatagcagtgactgggggccgagaagaggggggccaatcaatactcctcagggatgaggagtaagagacacgggacagtatgaaaaagtgtatttaccattacagggataactttcatatttacaaaatgaagggggaaaccccatggttttcttaatacaaatcacatactgtaaaggtccacaaactcttctcagctggggatctacgcagaacacatgagggcatctgctctgggggtaacagggaaggaaagaaaacagtgagggttttttttgtttgttttttagcataggttttgcttttattttccttttatttatttttttgtagagacaaggtctcgatttattgccctggctggtcttgaattcctgggttccaacaattctccgcattggcctcccaatgtgcggggattataggcatgagccaccacacataggttttttgtttttgagacagagtctcgctctgttgcccaggctggagtgctcgcccaggctggagtgcagtggcacgatcttggctcactgcaagctccgccttccgggttcacaccattctcctgcctcagcctcccgagtagctgggactacaggcacccaccaccacacctggctaatttttttatatttttagtagagacggggtttcaccgtgttagctaggatggtcccgatctcctgacctcgtgatccgcccgccttggcctccaaagtgctgggattacaggcgtgagccaccgcgcccggcctcacacataggttttaagttacattatctgaccccagagctgtaagaagctgtagagatcatcccactaaaatacccttggtcccacccttctccattttacagctgaagtaaaccaaactgtagggcggggaggtaacctcacaaggctgcatggtaaattatggacaaaactgaagctaggccctacatctttggtttgtttttattgaccctatgctcagttgacaaaagaagccttagatcccttgactctcaggctggtgctctcttctccaacccaagctgccctacctccacacctctagcacagaggtcacagcacactgagaacctagcacagcgctccgcaccaggagctatgttaagaatggaagaacaaaagcccacaaggagcagttaagcaacaaagtcttgtgtcattatcagccagacatcaggtacccagtgagtcccagcaggtgtgaggtccaaggctcattgttagccccagacctcgttccaccctagacacctcttagggtggtagtgtccgccacccctccccttgtcttccagtctccctctcttcccttttgacctcagcccccaaggccagaaatggctgctgggccaccagggttgggttggggcaggaagtggggggtttacctgcccgaacaaagtagcagtgcagggagtgcacgtggacgtcttcactcacagacttggctgcagccaccagggcctggcccacgatctgaccaccaaacagcctcttggccggtacccagtaatgccttcctctgtagggagagggggaaagagggaaagacttgggaactgggccaaattctactaccctcactaagactctaatgcatgatctcttcaccatattggggtttaagatccttttgagaatatggtaaaagccataggtcctttccccaggcaaatatccttatgcataaaaatcctctgggccgggcgcagtggcttacatctgtaatcccagcactttgggaggccgaggcaggtggatcatttgagatcaggagttcaagagcagcctggccaacatggtgaaactccatctctactaaaaatacaaaaattagctggacgtggtggcatgcacctgtaatcccagctactcaggaggctgaggcaggagaatcacttgaacccaggaggcagaggttgaggtgagccaagatcgcaccactgcactccagcctgggtgacagagcaagactccatctcaaaaaataaaattaaataaatgtataaatgaataaataacaagagccctcagacatcaagtctaactccttcagtgtacagatgagaaaactgcagcttggccccagagatgaaaatgcttgcccagaatgtaggcccattggaagctgaataattatgtctctagcctcccacgtcccagctgtttggcattttctgtaacaatgagttatgaacagccctccatgacctggcaggtggctctcgcctgtaatcaatcccagcactttgggaagccgaggtgggaggatcgcctgagcccatgagttcaaaaccagcctgggctccaaagtggggcctcatgtctactaaaaataaaaaagttagctggatgtggtggcaagcgcttatggtcccagctaaacgggagactgaggcagaagggtcacttgggcccaggaggtcgaggttgcagtgagccatgttcgtgccactgcactccagcctggacaacagggccagatcttgtcttcaaaaacaaaaatcaaatagccctccaagaagttatttacaattccttaagtggaaggaagggagctcaaagtaagataacttccagtaaagccaggagaagccttggaggtcaaagctgttagaagccttgctgcagggggctgggcgcggtggctcatgcctgtaatcctagcactttggcagaggtgggcagattacaaggtcaggagttcgagaccagcctggccaacacggtgaaaccccgtctctactaaaagaagttaaaaaattagctgggctgtggcgcgcctgtatgtcccagctaatcaggaggctgaggcaggagaaatgcttgaacccgggaggcggaggttgcactgagccgagatcgcaccactgcactccagcctgggcaacagagcaagactccgcctcaaagaaagaaagaaacccttgctgcagtcaagaacttcagcgatgctgggaaagaaaaaaacatgcttaggcctcagaataagtaatgagaaaccagacccaccaaatggtactgggggcgggatattgtgagaagaaaaggatactgaagacacaaggagctgcggcgtcggttttaaggctgatccatcagctgtgtgcccttgggcaaatcactgccctctctgggctagctcccccgtgaaggcttagggcaggctgccgagcagggtctctcaggtcaccactatatttgctcagctgtgcagacctcgcagcgcggagaggaagggaggaagccagagcagagaggacagctctgttgggggcgagttctctcctaatcgtggcagagggtgcatcccacgcagagccatactagtcccggagccaggggccccgggcggcggcagtcaagatcaagtttctgccctaaaggaggggatgctgggcaggagctgccggctacctgaagagatcctcgtccagcggctcgaggttgagcacggtcgtgaccaagacgctacggaggtccccagggggatcgccgcggtcgccacagccctgcccatcttctggggcctgcggggacgacatctagttcaatgctgcaggccctgcacacccgctccgcggaagacgcggagacatacacagaacctgactcttccg

SEQ ID NO: 991 - DNA, 3968 bp, Homo sapiens
ctctgtatcatgcaaattttaattattcccataagttaatcatcaaaaactaataatatttatggaaaactagattatgccaagccctgcactagatactttactggcaaagactcattgaattcttccatcacaggatgaagagattcagagttcaagtaatgcccccacccacacaaaagaaaacagccaggtatttcactaggctggaaggattacaatatcaaaaggctggtacttacaaacaaattaaagaaacaaagcacatatttactcccaactagcataaagataagaacctggctgagcccaaggtaagtattcaaatactttatagcagtgactgggggccgagaagaggggggccaatcaatactcctcagggatgaggagtaagagacacgggacagtatgaaaaagtgtatttaccattacagggataactttcatatttacaaaatgaagggggaaaccccatggttttcttaatacaaatcacatactgtaaaggtccacaaactcttctcagctggggatctacgcagaacacatgagggcatctgctctgggggtaacagggaaggaaagaaaacagtgagggttttttttgtttgttttttagcataggttttgcttttattttccttttatttatttttttgtagagacaaggtctcgatttattgccctggctggtcttgaattcctgggttccaacaattctccgcattggcctcccaatgtgcggggattataggcatgagccaccacacataggttttttgtttttgagacagagtctcgctctgttgcccaggctggagtgctcgcccaggctggagtgcagtggcacgatcttggctcactgcaagctccgccttccgggttcacaccattctcctgcctcagcctcccgagtagctgggactacaggcacccaccaccacacctggctaatttttttatatttttagtagagacagggtttcaccgtgttagctaggatggtcccgatctcctgacctcgtgatccgcccgccttggcctccaaagtgctgggattacaggcgtgagccaccgcgcccggcctcacacataggttttaagttacattatctgaccccagagctgtaagaagctgtagagatcatcccactaaaatacccttggtcccacccttctccattttacagctgaagtaaaccaaactgtagggcggggaggtaacctcacaaggctgcatggtaaattatggacaaaactgaagctaggccctacatctttggtttgtttttattgaccctatgctcagttgacaaaagaagccttagatcccttgactctcaggctggtgctctcttctccaacccaagctgccctacctccacacctctagcagaggtcacagcacactgagaacctagcacagcgctccgcaccaggagctatgttaagaatggaagaacaaaagcccacaaggagcagttaagcaacaaagtcttgtgtcattatcagccagacatcaggtacccagtgagtcccagcaggtgtgaggtccaaggctcattgttagccccagacctcgttccaccctagacacctcttagggtggtagtgtccgccacccctccccttgtcttccagtctccctctcttcccttttgacctcagcccccaaggccagaaatggctgctgggccaccagggttgggttggggcaggaagtggggggtttacctgcccgaacaaagtagcagtgcagggagtgcacgtggacgtcttcactcacagacttggctgcagccaccagggcctggcccacgatctgaccaccaaacagcctcttggccggtacccagtaatgccttcctctgtagggagagggggaaagagggaaagacttgggaactgggccaaattctactaccctcactaagactctaatgcatgatctcttcaccatattggggtttaagatccttttgagaatatggtaaaagccataggtcctttccccaggcaaatatccttatgcataaaaatcctctgggccgggcgcagtggcttacatctgtaatcccagcactttgggaggccgaggcaggtggatcatttgagatcaggagttcaagagcagcctggccaacatggtgaaactccatctctactaaaaatacaaaaattagctggacgtggtggcatgcacctgtaatcccagctactcaggaggctgaggcaggagaatcacttgaacccaggaggcagaggttgaggtgagccaagatcgcaccactgcactccagcctgggtgacagagcaagactccatctcaaaaaataaaattaaataaatgtataaatgaataaataacaagagccctcagacatcaagtctaactccttcagtgtacagatgagaaaactgcagcttggccccagagatgaaaatgcttgcccagaatgtaggcccattggaagctgaataattatgtctctagcctcccacgtcccagctgtttggcattttctgtaacaatgagttatgaacagccctccatgacctggcaggtgctctcgcctgtaatcaatcccagcactttgggaagccgaggtgggaggatcgcctgagcccatgagttcaaaaccagcctgggctccaaagtggggcctcatgtctactaaaaataaaaaagttagctggatgtggtggcaagcgcttatggtcccagctaaacgggagactgaggcagaagggtcacttgggcccaggaggtcgaggttgcagtgagccatgttcgtgccactgcactccagcctggacaacagggccagatcttgtcttcaaaaacaaaaatcaaatagccctccaagaagttatttacaattccttaagtggaaggaagggagctcaaagtaagataacttccagtaaagccaggagaagccttggaggtcaaagctgttagaagccttgctgcagggggctgggcgcggtggctcatgcctgtaatcctagcactttggcagaggtgggcagattacaaggtcaggagttcgagaccagcctggccaacacggtgaaaccccgtctctactaaaagaagttaaaaaattagctgggctgtggcgcgcctgtatgtcccagctaatcaggaggctgaggcaggagaaatgcttgaacccgggaggcggaggttgcactgagccgagatcgcaccactgcactccagcctgggcaacagagcaagactccgcctcaaagaaagaaagaaacccttgctgcagtcaagaacttcagcgatgctgggaaagaaaaaaacatgcttaggcctcagaataagtaatgagaaaccagacccaccaaatggtactgggggcgggatattgtgagaagaaaaggatactgaagacacaaggagctgcggcgtcggttttaaggctgatccatcagctgtgtgcccttgggcaaatcactgccctctctgggctagctcccccgtgaaggcttagggcaggctgccgagcagggtctctcaggtcaccactatatttgctcagctgtgcagacctcgcagcgcggagaggaagggaggaagccagagcagagaggacagctctgttgggggcgagttctctcctaatcgtggcagagggtgcatcccacgcagagccatactagtcccggagccaggggccccgggcggcggcagtcaagatcaagtttctgccctaaaggaggggatgctgggcaggagctgccggctacctgaagagatcctcgtccagcggctcgaggttgagcacggtcgtgaccaagacgctacggaggtccccagggggatcgccgcggtcgccacagccctgcccatcttctggggcctgcggggacgacatctagttcaatgctgcaggccctgcacacccgctccgcggaagacgcggagacatacacagaacctgactcttccg

SEQ ID NO: 992 - DNA, 672 bp, Homo sapiens
aaatacacccccttcctcttgtaacccggtcaggcctagggttcctccctgagttccagaataggccacccagttggggcggacccttaaggcattctgggcccacgcctgcctataaaccctcatagtgtgacctttgacccctggtgtgatcttgggcccgggctgggaccagcccctagtgtgggttgtgggggcggccatggagctgggcagctgcttcaagacctatgaggacttcaaggagtgcttcagcgcctacaaaagggagaacaggtgctccttcattctcagggactgcgtctccgtccgcttccacaacctcaaccatggcacctccatccgcgaagacatcctgtaagggcgggcggggcggggcgggccaagagggtggggaggaggctggacctccggagggctgcctggaggaggaggggtgcataggcacgcattgggctgcgtggccattcattcaacaggcactcattgagcacctgctgtgtgccttgtgaagagagctaagcctccacggccattggtttttgaccacccactccactttcactccattcacaggcttttctggaatttataactgcagtttctcccattgttttgagcagctgcagcaacccaaatacaaagtatggctttcataaacggataaaaaca

SEQ ID NO: 993 - DNA, 379 bp, Homo sapiens
aattcatgaaattaaacagatattattgcctttgggaaacatgtttttattgtcatttaaatcacatattaagaaaataatattgctataatttttagtccctcctttgagttctttctagctaagcactttcaatgtgtaaaatatctatcccttcttacagagagacaagtatacaaatagttaaaagttaggattaacaatgccatattaatggtggaaaaagccctacccttcttttaacagggtattttatacctgttgttttgatattcatttattaatgtattaaatatgccatataattttctggatcttagtttacttttctgtaaaattttacttctacaattatttgagattttatatctatttttgg

SEQ ID NO: 994 - DNA, 730 bp, Homo sapiens
aattcatgaaattaaacagatattattgcctttgggaaacatgtttttattgtcatttaaatcacatattaagaaaataatattgctataatttttagtccctcctttgagttctttctagctaagcactttcaatgtgtaaaatatctatccttcttacagagagacaagtatacaaatagttaaaagttaggattaacaatgccatattaatggtggaaaaagccctacccttcttttaacagggtattttatacctgttgttttgatattcatttattaatgtattaaatatgccatataattttctggatcttagtttacttttctgtaaaattttacttctacaattatttgagattttatatctatttttggaatatataactgttcacttacagtcctctaacatctattacatttatactttttgacaggcattgttcaaagaactttagttatattaaatatgactaaaacctgatgacaaactatttctgtctctattatgacaggcattgttgaaataactttagatgtatcatagtaaacatgacaaaaacctgatgacaaactatttctctccatctatggcaacaaaagtggcccatagagagtttgctccagatcagaaagctagtggttccagtgctagagagggaaagatcatacacttaattgacacacttatttatggcatactatgtgccagtaactactcaaactgctg

SEQ ID NO: 995 - DNA, 388 bp, Homo sapiens
tatcactttcatttactttacaaatgctcctcagaatatgaaacatccagtgaaaataactgataaaacatttattttggtgttctcatctgtgtgagggattaggggaatactttctattctcattgctccaggaatatagaccaatgctattgcttcttgtttcattatcattgtaagttttagatgaaggtgcagcaggatttaggggaagggctgcagaaggggataaagctaatacacaagtaaagaaaggtaactaagtagagaaaggtaaattcttcccttttaaaagcatgtaaatgttcacttttcagttcaaaacaagagaaaaatggcatgttttccatagttgttaatatttagtaccgaaataacagaacactta

SEQ ID NO: 996 - DNA, 1257 bp, Homo sapiens
tattatttgccagtcactgtgctaatgattacctgggcaattaaaaaaatttaagcatgatctttaccaaaaaaacctacaaaacttgagtgttagctgtgtatgtaactaaagtttgttacttaaagtacagtgtagtgtcatagatacaaaataagcaagataggccattaatagttccaaatttcttgagaatagggattgtgcatgttttatctttccatggaataaaaagtaagtattgtttttaaaataataccaccattaaatgtgttgttaataacattggggttttgccattaagagtaattgagagtaatggcaaaaaccgcaattacttttgtacccaatgtattaatgattatcttcttccttcttgatttagtattattgtgaaggggtagcatggaaaagaagtagcaataagcaaaaaaaggaaattcacctaaacatttctgtgtacctaggtaaccctaacttaaaaataccttttccatacaaatgtttactccagccatttgtatgggaaggccacttggccctaaccagtatgtttccagggattttctctgatctcttagcagcttggtaaaaagctctgccttgctatacctcataaatacctattttccttatgctgatggacaaccataggattctatgatgactcaacagtcatacatactttttttaaatacttcatcagctccccagtactttgttttctgtagttacagtcatcttcctttaccactcctcatcttccttgtcattagagctgtttgtatcttaccaaaaaaattaattctatcctgcatcctagctactatctccttattcttcctacgtccagactctacgcttcctgtaatgatgtctgtttctgccagtctttccttattgctcttaaacatttttttttactgtgtttcaatttcccctggagcccttttataatgattcatcattagaaacttagaggggtggggctgggtgcagtcgctcatgctaaggtgggtggatcacctgaggtcaagggttcaagaccagcctggccaacatggtgaagccctgtatctactaaaaatacaaaaattagccaggtgtggtggcgggcacctgtaatcccagctactcgggaggctgcagcaggagaattgcttgaacccaggaggcggaggttgcagtgagccaagatcgcaccactacactccagcctgggtgatagagcgagactctgtctcaaaaaaaaagaaa

SEQ ID NO: 997 - DNA, 290 bp, Homo sapiens
cggggggagagatttgaggtaaaatttacatacagtgaaatgcacacatcattagtctactgtttgatgcgttttgacaaatgcttacacctttgtaattcaaacccttttcaatatatagaacattatcattgccccagaaagttctcttatactctttcctagtcagtttttgactccgtactcctaagaaggaaccaccattatttttgtggcttagttttgcctattctgaaacttaatattagtggaatcatactgataaggcttttttttgtaaggcttctttc

SEQ ID NO: 998 - DNA, 468 bp, Homo sapiens; identical to SEQ ID NO: 202

SEQ ID NO: 999 - DNA, 5989 bp, Homo sapiens
tgttggtcaggctggtctcgaactcctgacctcgtgatccgcctgcctcagcctcccaaagtgttgggattacaggcatgagccaccatgcccggccaattaagggtcttaattaccaataaaaaacattctatttgctataactgcagaatctgaaaattgtacctcaattccgaaatcaccaatttatttgcctcacagcagccaatgcaacggtcttccttgtttgagaagctactcatctggtatttagaaagatatgatttaaagccaaataattctctttttaactgcaagtttaaaaacaaacatatgtaaacttatgtaaatgagatgcatttgcttttttattcagaacttcaaattttaaaaactgtatgaatttaatggaaacaacttaatgtccatcaataggagaatatataaatacattaagaaatattaagataattggaaaactacaatagttaaaagaaataaacctgagtcacataaatcagtatggatacatctcataacaatattgagtgaaaaacaaattatagtggcaaacagtattttcataaaaacactaagcaacatatatatatttctagatgcatcgatatgtgacaatatttaaaacatggacgagaaggatacacatgaatttcagaataattgccatttctgaggagagaggaagataattgggatctgacaaggtacacaaagaagatttacctgtaaaattttattctaaaaaaacatagagttgataagacaatatgtgtcccaaattttacaaataaggtgctacactagcatatgcacctttctgtatgtttggataatacagaattttaaaagacagttataaaaaggagcaaggttagcatttaatgacttctaccttcaaactataaccgaatcacacctcctagaagtagaaaaaaatcacattttctaatcgtgtcattcttagcactacaagaaacaaacgatcaagcatacattaccacattcggaatcatatctcaaatgattcttttttgagagacagggtctcactctgtcacccagactggagcttatgatcatagagctcactgcagcctcgaactcttggactcaagcaatcctcctacctcagcttctcgagtagctaggaccacaggcatgcgccaccatgcccagctaatttttgcatttttgtagagacagggtctcactgtattacccaagctggtcttgaactcttgcttcaagagttcctctcaccttggcctgccaaaatgctgggattacaagcaggagccactgtgcctgaccatatatgaaataattcttgatacacaaatgagaatgccaaattaaaattgttatctgtatatgattactttctaatttcaaaagcaaacagtacattaaaaatccaagcaaataaacagcatcctgggaaagcagatatcagaggagctaagatcttatgttctagtttaaattctactacttaccagttgggcaagttatttactttcttgggtctaggtttcttcaccaataaaatagtattgaatcagatgatttctgagatttttttggttcataattccacagttcataacagtttaacattggtaagtctaccatctagtctaccatacattcatatctgaaaccaaccataatatatttacctatagtttcccctgatctttccttcattttacacctattgattacaaattcctgaataggtttacttaccttcttcttaatctcatttatatatatggtcacaaatattactaaaagagaaaaggtggtagaccattattataaaaacattttaggccaggcgtggtggctcatgcctgtaatcccagcatttcgggaggctaaggcaggcagatcacctgaggttgggagttcgagaccagcctgaccaacatggagaaaccctgtctctactaaaaatacaaaattagctgggcatggtggcacatgcctgtaatcccagctactcaggaggctgaggcaggagaatcgcttgaacccaggaggctgaggttgcagtgcgccaagatctcgccattgcactccagcctgggcaacaagagtgaaacttcgtttcaaaaaaataaaaggccgggcatggtggctcacgcccataatcccagcagtttgggaggccaaggcagggggatcacgaattcaaaagatcaagaccatcctggccaacatggtgtaaccccgtctctactaaaaatacaaaaattagatgggcatggtggtgcgtgctatagtttgagctgcttgggaggataaggcaggaaaatcgcttgaatccgggaggcagaggttgcgatgagccaagatggcaccactgcactccagcctggcgacaaagcgagactccatctcaaaaaaagaaaaaaaattttaagttctatgccattctaataagtacatgaaaagttgctcatcatgagccattaaaaaaaatgtaaattagggccaggcatggtggctcacgcctgtaatcccagcactttgggaggccaaggtgggttgatcatgaggtcaggagttcgagacccgtttgaccaatgtggtgaaaccccgtcccttgtgcctgtagtcccagctactagggaggctgaggcaggagaattgcttgaacctgggaggtggaggttgcagtgagctgagatcatgctgctgcactccagcctgggcaacagagtgagagactccgtcaaaaaaacaaacaaacaaaaaaaaagaaaaaccacaatgtgataccacttcacacccactaagatggttataataaaagagacagacaagaacaagtgttggcaaggaagtggagaaacaggaaccctcatacattgctggtgagaatgtaaaatagtgtagacattttggaaaacagtttggaataaattcaccatatgacccaagaattctactcctaggtatctacccaagagaaatgaaaacatgtccaaagacttgtatgcaaacgttcatagcagcattattcataatatcccaaagtggaaacaatccaaatgtccatcagccagtgaatggataaacaaaatataacatatctatataatgaaatactatttagcaataaaaagaaatgaaatactgatatcacaacatgaacgactctaagaatgcaaaagaccaggtgcaaaagagcacatattatacgagttcatttatgtgaaatgtccagaaaagacaaatctacagatgcaaaaactattagtgtcttcctaggggtagaagtgagtacagggactaattataaatgggtccaaaataccttttggggatgacagacatgtttcaaagctggatcatggtgattgttacaaaacttataaatttactaaaaatcatagattagtacacttaaaacaggcaaattttatggtatataaatgatacttcaacaaagctgtttaaaaaaaattctgtgccattcttatatatggcatctgagaaactggggaaaagtgtagaatggtaagtgcaggaaaaaaaatagagatttagacagaagagaaattcatgactaaaagtatagagaaaaagaaattagaagctaataaagcaaccacaaaatgatagtcttttctaaaacactttagtaaaattcttcttttccattacgtaatcacacatacttactggcaactgggatataatcttttccaaacttcttagttctacccttgaactttcaatttcttgttgacataaatctagtcgctcattctgtgctgcaacacggacctttaattctcggttttcattcattaaagaaaatttgtctctaagtatttcgtctttgttctctaactcactctctagcttcaaaatactttgtctagattcagttagttgtgccatgacttctgaatttttcactgccatgatccttaatttttcttttccgttgttattttcttcttttaactgcctatgaagaaaagagaataaaaatgaaaataaaatatatatgcattcattttaatcatatttatttaatctcacttttaaaattttttgaagcttaattctaaaataatacctgctcacatttactaaatacctactttctgcatgccaggcactcacaactttatatggttggcactattattacttcttatttacagatgaggtaactgaggcacaaaaaggttatataactttcctagtgtctcacagtaaatggtagggaaggacagccctactgtcttaaaagcatttctgctccctgtttaattatataagacaggaaatctaacttcaaaatccctgacatagcatttcacattatcaacaaagttttggattcctaaaacaggagaaaaagtaaactggctctacataattgtacaaccagcttaagagcccagcatcaatgactttctgttcttacaaggattcttttaagaaatactgcatcaacaagtcttaatggcacactgggagatactgtgaggaaaaacttagacattttagagggttagactccaaatgtgaagttttaaaaatatcttaaccaatttatttcacttatatttgaaatatgagaataactttttgaaaaatatgaaaataacgacttaagaaatcatatctaattacaaatacaagaattctttcatgaagtataaaaattttaagtgataaaggattgcatcatagtgtaattggcagcatctttctttcttaaaagtatatcttgcaatcgataaccgattctaaaaaatactctagtaaaaagtatctttacttcctcctccttggcaaaaatactaaacagactaccttaaggaaagtatggcaaaattagacaaatcagtcattgattgcttcctgctcccccttttttttaaattaacagtttgaagtgataaagactggttaatattaacctctgaaagttgatgggtgttagttttgagaggacaacatgatgtactaaaagagagcattggagtcagaagacttcgatctttcagaccttcagtaaattctggctactctcggggcttctgtttacttataaaatgagaagtctggactaggtaattttttatgatttgaaaaacacttttttttagaacatcggatattatacacattttactagtgagttaatgtggttatacatcaaggacattatatctattaattttctctaaatatatgcaaagcaaatatgttgatcagtatgtctccgtatttacaaatattattagcattaacacattttacttcacttctaattctaactctatagctagaaaacagtttcagtcatgaagcctatccttctatataatgtaagcctataattacaacaataaaatattgtgttttaaagtgtttcagttttttccatgtccacacaaaaatcctttttctacaacagaatactgtaccttaatttctctttcagaatttcaagttcacttttatatagaccacacctttcttgtagccttttattttctttttcacagttagttagatttctctctaatatttcttcttcagcttgaacctaaaacaataatttaagtggacatactaatgtggttgtaagttttaggtgtttcaagctaaaaatgtcagtagtgatttcagaaataagcaggagagtagactaagaatttcatacatttaagtccccagccttgtagtgaaaagaagcaaagtgaagttcctgggcagtagcaaaggacagagaaaaagacactactacctgtccagaaaacctgtaacagataggcaattgcatcaactgaagtcaaaaattcatctacagctgctgcgtccgagttactaaaggttaatttcagtgcaaatattccagagaagttacttttgaaatttgaaccacaaaatttaccaacgaaaccacagcccaaatgtagaacagaaaaagcacccaagatacactgttgagagg

SEQ ID NO: 1000 - DNA, 317 bp, Homo sapiens
aaatatattatgagaaatactcaccccaagtttccaaaatccctcctatcctccttacgctatgaaaatcacttaagcaacatcttaatttatgagaccaaagacatttaattcaaaatcgttcaatttccttccacctaaaacttttttctgtttttatccacttttttcccataaagaaatgtcctatttcattaaaaaaaagaatctcacttctgctcttggactatcatcttgcatatcattcagacccttgtgccatcttttattccttataattctagcatcttcaatctccccctactaatatgttcagg

SEQ ID NO: 1001 - DNA, 3091 bp, Homo sapiens
caaaagacatgcacatttaaaaatgtgctaactatactagctaaaacctgtgcttaatatatgccagaaactgctctggtgctgttaatggagcctgctaaacaaaactgcttctcaacaatagaagttgtactacgctatggagtggacactccatagcaatgaaatgttttggagtgcctgtttcctcatctcagcaacataatagttctcaaacttcttagtctttgttattctgatatagataaaatgttttctattatgagtttcattttttttttatgtttaacagccatttgtggggctgagtgcagtggctcatgcctgtaatcccagcactttaggaggccgaagcaggcggatcacttgaggtcaggagttcaaaaccagcctggccaacatggtgaaaccctgtctctactaaaaatacaaaaacattagccgggtgtggtgatgggcacctgtaatcccagccacttgggaggctgaggcaggagaatcgcttgaacccgggaggcagaggtttgcagtgagtagagatcacgccactacactccagcctgggtgacaagagcaagactctgtctcaaaaaaaaaaaaaaaaaaaaaaaagccatttgtattctttcctgtggtcttttctcactggtctttttattaatagtttttgggaatactatatattaaggaaaatgacccttttgactttatgatgcttttttcatgcagagatttctttatgtaggcaaatttagcaattctttcactaaaacttttctagtgaggtccttcccactcaaagatcataaaagactataaaaataattatcctttggtttctttttttaaatttttgattacatctttgatccttctggaattaattttggtgcaaggactgaggtaggggctcacgtttccttcccgatgtcagccactacttttggtcttttaatctataaaagcagggcactgggttagaatttcctaaattctcttatatatcaaacaaagcactcactgcaaacttgatcaatagaggaaagtatgctttttttgtattttaccttttaccagtttcacttactgtaaatcataaggttgtcttacatagtagaaaaatagcattatcttaaacctggctttttattactaaatatatcactaaaaatgctttacaaagcagtaatgattttatttcttggggaataaaatcaagaaagctaaaggagctgctatgccactgtgtaagatctagtcctttaaaaatgaaatttcatacctcaccatgtttggattagttcttcatgagattcctgttggagactgacagttttagagaaaggcagagtatttattgacattaggaaatgccaagacctatagagactagccagggaaaaggactggatgtggtgaagtgaagaacattttgaaagtaagctctgtgagggcagtaaaattttcacttttgtatactgctttgtctctaatgcaagaaacagtgttctaagcatgtttgtaaatatacaaatacccaggttaaaggggatagccactgtttagctcagtcctgttgctagatggaaatgtgaatataggattcccagatctctcaaattttcaagtggaactagaactcgtgaattctgaattttaaatacagtattggcaatgaattccaattttggggtcaaaacatgtctataggtaagattctgcccaaaggtcaccagtttgccacttctataaattaaatagtaaatataagtgtaataatttttacttgagtcaggtccaaggttaataaaagtttatatatgccttacagctaaccattgtttttataggtcagaaacccttcttgccctgattggaaactcaacttaccctgcagcaaaggtaaataaaaatgtttcaattgaacttcattgtgctcctgggcctttattcttcaagagttaacagtgcagacttctggtgatcctcatcctaggtgttaccacatctatagaatagtaactcaggagtgcaatagactgtcgcattaaaaggaaagaaaaataacttttcagcattatgtagcactaaattttggaactggaaatggcctttatatcatctagtctttcattagaaaagcaggacaatcaacttggacattgtcctcgggcagataagagatagtaaaataccataatccattcatatttgtgtaattctttgattctccaaattttttccaaaaaatattaatggcttatacaaagaaaaacaagaacaaaatatacaaagaaaaaaacaaggttatgaaagaaattaaaagcaaggtagtgaatcacggatttgaatagggctctgtttttcttactggttttgtaacatcagacaactcatgtaacatttcggtttcctcatctgtaaaatttgaatgtttttgaggattaagtaaagtaatacatttaagacacttatcctggtggcaagaaatagtaaatgctcgataaatattagctaaaagtatatatgccgatatacatgggttaatacagatactacgatggagtattagataaagttctagctcactgcagccttcaccttccagactcaagcgattcttctgcctcagcctctcaagcagctgggaccacagatgtgtgcctccacacatggctatgttgcccaggcaggtcttaaactcctggactcaagcagtcctctccccttggcctcccaaagtgctgcgattacaggtgtgagccactgttccagccctgaggttcttgatagtctaggtagagaggaaaattaaagaagttatgtggaaaacatacattctttaggagagtttttcctggcaccaaataaatattcatcccacagagttagagggatattgagtactggacttgattatgtccttgaccccagtactaaatttgtgaacttggacaagttatttaacctatcatgtataaatgtattaacatactgtatgtttacttttagtcacttttgagattgataaaaagtgctgaataaagtgttttgggaagtgcctttttcattcaatcctgtacacctaaaa

SEQ ID NO: 1002 - DNA, 3091 bp, Homo sapiens
caaaagacatgcacatttaaaaatgtgctaactatactagctaaaacctgtgcttaatatatgccagaaactgctctggtgctgttaatggagcctgctaaacaaaactgcttctcaacaatagaagttgtactacgctatggagtggacactccatagcaatgaaatgttttggagtgcctgtttcctcatctcagcaacataatagttctcaaacttcttagtctttgttattctgatatagataaaatgttttctattatgagtttcattttttttttatgtttaacagccatttgtggggctgagtgcagtggctcatgcctgtaatcccagcactttaggaggccgaagcaggcggatcacttgaggtcaggagttcaaaaccagcctggccaacatggtgaaaccctgtctctactaaaaatacaaaaacattagccgggtgtggtgatgggcacctgtaatcccagccacttgggaggctgaggcaggagaatcgcttgaacccgggaggcagaggtttgcagtgagtagagatcacgccactacactccagcctgggtgacaagagcaagactctgtctcaaaaaaaaaaaaaaaaaaaaaaaagccatttgtattctttcctgtggtcttttctcactggtctttttattaatagtttttgggaatactatatattaaggaaaatgacccttttgactttatgatgcttttttcatgcagagatttctttatgtaggcaaatttagcaattctttcactaaaacttttctagtgaggtccttcccactcaaagatcataaaagactataaaaataattatcctttggtttctttttttaaatttttgattacatctttgatccttctggaattaattttggtgcaaggactgaggtaggggctcacgtttccttcccgatgtcagccactacttttggtcttttaatctataaaagcagggcactgggttagaatttcctaaattctcttatatatcaaacaaagcactcactgcaaacttgatcaatagaggaaagtatgctttttttgtattttaccttttaccagtttcacttactgtaaatcataaggttgtcttacatagtagaaaaatagcattatcttaaacctggctttttattactaaatatatcactaaaaatgctttacaaagcagtaatgattttatttcttggggaataaaatcaagaaagctaaaggagctgctatgccactgtgtaagatctagtcctttaaaaatgaaatttcatacctcaccatgtttggattagttcttcatgagattcctgttggagactgacagttttagagaaaggcagagtatttattgacattaggaaatgccaagacctatagagactagccagggaaaaggactggatgtggtgaagtgaagaacattttgaaagtaagctctgtgagggcagtaaaattttcacttttgtatactgctttgtctctaatgcaagaaacagtgttctaagcatgtttgtaaatatacaaatacccaggttaaaggggatagccactgtttagctcagtcctgttgctagatggaaatgtgaatataggattcccagatctctcaaattttcaagtggaactagaactcgtgaattctgaattttaaatacagtattggcaatgaattccaattttggggtcaaaacatgtctataggtaagattctgcccaaaggtcaccagtttgccacttctataaattaaatagtaaatataagtgtaataatttttacttgagtcaggtccaaggttaataaaagtttatatatgccttacagctaaccattgtttttataggtcagaaacccttcttgccctgattggaaactcaacttaccctgcagcaaaggtaaataaaaatgtttcaattgaacttcattgtgctcctgggcctttattcttcaagagttaacagtgcagacttctggtgatcctcatcctaggtgttaccacatctatagaatagtaactcaggagtgcaatagactgtcgcattaaaaggaaagaaaaataacttttcagcattatgtagcactaaattttggaactggaaatggcctttatatcatctagtctttcattagaaaagcaggacaatcaacttggacattgtcctcgggcagataagagatagtaaaataccataatccattcatatttgtgtaattctttgattctccaaattttttccaaaaaatattaatggcttatacaaagaaaaacaagaacaaaatatacaaagaaaaaaacaaggttatgaaagaaattaaaagcaaggtagtgaatcacggatttgaatagggctctgtttttcttactggttttgtaacatcagacaactcatgtaacatttcggtttcctcatctgtaaaatttgaatgtttttgaggattaagtaaagtaatacatttaagacacttatcctggtggcaagaaatagtaaatgctcgataaatattagctaaaagtatatatgccgatatacatgggttaatacagatactacgatggagtattagataaagttctagctcactgcagccttcaccttccagactcaagcgattcttctgcctcagcctctcaagcagctgggaccacagatgtgtgccaccacacatggctatgttgcccaggcaggtcttaaactcctggactcaagcagtcctctccccttggcctcccaaagtgctgcgattacaggtgtgagccactgttccagccctgaggttcttgatagtctaggtagagaggaaaattaaagaagttatgtggaaaacatacattctttaggagagtttttcctggcaccaaataaatattcatcccacagagttagagggatattgagtactggacttgattatgtccttgaccccagtactaaatttgtgaacttggacaagttatttaacctatcatgtataaatgtattaacatactgtatgtttacttttagtcacttttgagattgataaaaagtgctgaataaagtgttttgggaagtgcctttttcattcaatcctgtacacctaaaa

SEQ ID NO: 1003 - DNA, 2089 bp, Homo sapiens
tgaattaaaatacaatattttatttttgtcacctaaaaaacaagcaacccagaattaagatatacgtaagtttctcaaatttatcctaataaaattttgaatatttatacaatttctacagaaacatacagtgtatcaaaatctgcataaatcaaatttataaaatgtgtagaaatgcatagtgatattaccaacttacaaagcaaggatatgggaattatttccaaagcagcctacagtagaaaatagtcattatggcagcagcttctgatgtttttgtttggtaggttttctgatttcaatatatagaatcatattcatagagtatcttcttttaacgaattgcacaaagtacccatttaaaatttacatgcacagttcattgccacctttcttaggcctatgcatagttaataaggttataatctactcaacatggaaaatggagcctatttgcaaacacacaagtaattaaagtaccaattctctcttagtttctttttttatagttggtttattttgcaattataaatgttaaacatccctagagatgaaagttaaaatggttgatcacagatcagtagcaaaatacaaattgacaattcaaaattataaataaaactctgttgaggatgtttaactttgagtctccaaatttaagagctaagcttggaagaaacaaatttataggttatatttccctcttaaattaaaaaacaaacttcctctggcagtagtttgtgaattcctttcattgtaatgataccatgattacaggatcaaaaatgcttaacttacttgccattctgctcacatcatcacagttgtttttttttttttaagcactcaatgtaggcattttaatcttctggataacagagtatcttttgagaaattaaaatcgaattgaccatttgcaatatttggttttcctaataggtactgtcttagtaaatgtttaaatccaaacaaatcttctgttcaccggaaaaatactaataaaaatacactttctaaaaagaaattaagaaacactagggaacacctaatgtaacagaaagtagttcacgtttgttaataaactgtatttttaaatagtcctttgtttttaaattttaaaaacgtgcagataatgtcatttggatgaaaatataaatgaaacatcagttcactcttggcttcacaggttgcacagcttaggttataatgcacacaagttttataaggcctaatctaacaagggcttggaaagtcttacctcagtcagaatgaacctttgatgtgtttataacggtgttttgttgtttttgtcaccctcgctttcaagggataacaataacaactgataatagttttctgtattggcaggtattggagaaaagtaaatcccaaatgtcagtggacaatttttctctagttggaagactcctttgcaatcctagaagtaggtatggacagagggcactgggaatgccagtaggtaagggagtgaatgctacacaacttccaaccctatgggacagccttgggatgttccatattgtcatttctttttcaagccatacaaagttcaactttatagcaaatggcagcacataaattcatttctgagtagtaaaagtattccccatacaggtgacaagtccatcattaccatcctatagatttcatcacaagctcttgaaatatatactgagaaatgaaagaggcactaaatgtgttgaaattcacctttcaaaaaagcagcatgactgtgaaggaaggccaccttggctaataacctgtggcagtgcttcaaaaagatgtaaaattaaataaagacacaacaggttgataatcaccaagttatatatgaaagtctggctactccaaccttttttcaagtgtgttaaaaataaaaatcaaactgcctttcagacccctgagtgtaatcccaaagaagacaacatgctttaactctgtctaataaaacagagctaaaggcacaaattaccaacatcatcttaaaacacaacaaaaagatgtaaacatctacaaagtttaaggtaaaagcagtcttgtaaacagtaactgcagatgataatgttat

SEQ ID NO: 1004 - DNA, 180 bp, Homo sapiens
atattttcttttttttttcagacggagtttcgctctgtcacccaggctggagtgcagtggcacatctcggctcactgcaagctccgcctcccgggttcacgccattctcctgctacagcctcccaagtatctgggactacaggcgcccaccaccaagcctggctaattttttctattttt

SEQ ID NO: 1005 - DNA, 174 bp, Homo sapiens
  SITE (111): n equals a,t,g, or c
ttttcttttttttttcagacggagtttcgctctgtcacccaggctggagtgcagtggcacatctcggctcactgcaagctccgcctcccgggttcacgccattctcctgcnacagcctcccaagtatctgggactacaggcgcccaccaccaagcctggctaattttttctatt

SEQ ID NO: 1006 - DNA, 2016 bp, Homo sapiens
tgaattaaaatacaatattttatttttgtcacctaaaaaacaagcaacccagaattaagatatacgtaagtttctcaaatttatcctaataaaattttgaatatttatacaatttctacagaaacatacagtgtatcaaaatctgcataaatcaaatttataaaatgtgtagaaatgcatagtgatattaccaacttacaaagcaaggatatgggaattatttccaaagcagcctacagtagaaaatagtcattatggcagcagcttctgatgtttttgtttggtaggttttctgatttcaatatatagaatcatattcatagagtatcttcttttaacgaattgcacaaagtacccatttaaaatttacatgcacagttcattgccacctttcttaggcctatgcatagttaataaggttataatctactcaacatggaaaatggagcctatttgcaaacacacaagtaattaaagtaccaattctctcttagtttctttttttatagttggtttattttgcaattataaatgttaaacatccctagagatgaaagttaaaatggttgatcacagatcagtagcaaaatacaaattgacaattcaaaattataaataaaactctgttgaggatgtttaactttgagtctccaaatttaagagctaagcttggaagaaacaaatttataggttatatttccctcttaaattaaaaaacaaacttcctctggcagtagtttgtgaattcctttcattgtaatgataccatgattacaggatcaaaaatgcttaacttacttgccattctgctcacatcatcacagttgtttttttttttttaagcactcaatgtaggcattttaatcttctggataacagagtatcttttgagaaattaaaatcgaattgaccatttgcaatatttggttttcctaataggtactgtcttagtaaatgtttaaatccaaacaaatcttctgttcaccggaaaaatactaataaaaatacactttctaaaaagaaattaagaaacactagggaacacctaatgtaacagaaagtagttcacgtttgttaataaactgtatttttaaatagtcctttgtttttaaattttaaaaacgtgcagataatgtcatttggatgaaaatataaatgaaacatcagttcactcttggcttcacaggttgcacagcttaggttataatgcacacaagttttataaggcctaatctaacaagggcttggaaagtcttacctcagtcagaatgaacctttgatgtgtttataacggtgttttgttgtttttgtcaccctcgctttcaagggataacaataacaactgataatagttttctgtattggcaggtattggagaaaagtaaatcccaaatgtcagtggacaatttttctctagttggaagactcctttgcaatcctagaagtaggtatggacagagggcactgggaatgccagtaggtaagggagtgaatgctacacaacttccaaccctatgggacagccttgggatgttccatattgtcatttctttttcaagccatacaaagttcaactttatagcaaatggcagcacataaattcatttctgagtagtaaaagtattccccatacaggtgacaagtccatcattaccatcctatagatttcatcacaagctcttgaaatatatactgagaaatgaaagaggcactaaatgtgttgaaattcacctttcaaaaaagcagcatgactgtgaaggaaggccaccttggctaataacctgtggcagtgcttcaaaaagatgtaaaattaaataaagacacaacaggttgataatcaccaagttatatatgaaagtctggctactccaacctttttcaagtgtgttaaaaataaaaatcaaactgcctttcagacccctgagtgtaatcccaaagaagacaacatgctttaactctgtctaataaaacagagctaaaggcacaaattaccaacatcatcttaaaacacaacaa

SEQ ID NO: 1007 - DNA, 925 bp, Homo sapiens
gtcagaggggtgaggacggtcgagaaatggggagaagacttgggcttgagacgacctgggcttttcatgtgtagctcactcagcagtatgaggatgactgacacaccagtgggtggtttccaagtgaggcaaatgcccatttcccctctcccctcacaccttgcctggcttcttccatgaagtccttgctgcttttctgcctccccaaaggtgaggggaaggggctggttggggatctgggaaagccagttctctgttctctcctgctggtgatggactaggccttttagaactagcaagatccctcacacagctgggagaacacacacctttcttactccagacccattggtgtgtctccagtaacaaaattattggactcagcctccatatttgacagcaaaagtggccagagggagttgaaatatcttgaagaaaaggaattttcactaagatatgtcctctccctctcccagagtttagctgtttattccttttttttgtttatattgttctcatctgcataaaaccagtctcttgcaataagcctgccgcagaatcaaagtctgtacttcaaaaggtaactgcaccaagggatgggacagtgtgcatcaccctgatctaatcattgtgacgttggtagcttcctaaatactgtatgtaccttgaacaagggttttatttttgttttgttctgttttgctttttgtttttattggtaggctaaggtaattaaattttttaatttgctgttactttggttgtattttctgtactataactgcctacagtatgtcttttgcataaaatgcataagggtttggggatgtaaatggaattttattcatattttgtccaaatacctcttgtaatttgtatcaaaattcttgtacaatttttatattaaagatttatcagtcactga

SEQ ID NO: 1008 - DNA, 291 bp, Homo sapiens
catgaggtatgatgctcttgagctcccagacaatgtgctgagttaataggttcacttgagatgtatacaccaaggctgtttctttttttaaatctagtccccaatttggagtatttttgcatgtttttgtacagagtaatccattcctctcattgtgtatcttaatctcctctgacttttccattgtctttctcaatcccaccctttgctcttcggatctcaccaaccccccttaaaaaataaatcatgtttgagcaagaaggtagaacacgccctccctcatcttggttt

SEQ ID NO: 1009 - DNA, 243 bp, Homo sapiens
gggaagtcattcaagggtgtttagcaggtgagtggccagtctcatttatatttttgaaggatcattctggttgttggggggaaaattggctgtttgggggcaagagcagaagcagagactagttaaaaggctattagaagtcgaggggagagaggtcatgacatcttggactcaggtgagacaggtagaggtggtaagacgtgatcacattcagcacttattttacaggtaaagttgatgagt

SEQ ID NO: 1010 - DNA, 243 bp, Homo sapiens; identical to SEQ ID NO: 1009

SEQ ID NO: 1011 - DNA, 236 bp, Homo sapiens
aaaacattatgcctaacattaataaaagtccatttcaagtgctttacagcctaatttaaatggcatatacttaaagtactttaatttgcaactctgtggaataatagcaactattatttttttgtgccacttatgttccagacattttcctaagctttttatttcattagtcccctcgacaactcagtgagttatacacaattatcctgcaatcacaagccatgggaagggattct

SEQ ID NO: 1012 - DNA, 236 bp, Homo sapiens
aaaacattatgcctaacattaataaaagtccatttcaagtgctttacagcctaatttaaatggcatatacttaaagtactttaatttgcaactctgtggaataatagcaactattatttttttgtgccacttatgttccagacattttcctaagctttttatttcatcagtcccctcgacaactcagtgagttatacacaattatcctgcaatcacaagccatgggaagggattct

SEQ ID NO: 1013 - DNA, 843 bp, Homo sapiens
cacctctcctttcttccatcttcctttttcagtggctgtaagctcttggtgggctggaagacacaaatgaattggacaaaaacaaatttggctgttgcttcaaagccattgcattctttgtgtgtttttttttctttcttttttttaagcttttctttttttttttttttttttagcttatggttaagagggcattatctttgcattagatggccatcaaaacttatttattgggttatagatgaagagaacgaatggacttatttcgatccaaggactggaagaaatggacatattgttgatttcttgtaaaatgcactgaatgtctacctcagaactttagcagatgcctgcttctgctaatttaaggaactgatgctatttgtctttttaattttacataggaaatttaattttgatttgaagcttttaatgcctaatggtaaatatgaaaatgtgtgatagagcaaattatttttcatctcttgcatttcttcgtgtatctcacactcaggggaatttttatgtagcataacgatttcataagtgttaacatttaagaaaattttcacattataaatatgagcagaagcctgctttagaaattggaaaccaagtttggccaaaatgaaaggcaaagtcatggctatgttaaaactcacatcttggggagttctgggtggtatactgacagtggaatagactcagatacagtgcttttagtattgattagtaattcttgaccaacggatcttggaactcaagagggccatggaattacttccaggccactgttaactttctgtgcattctacatttcctatacactgaaaaaaaaaaaaa

SEQ ID NO: 1014 - DNA, 1213 bp, Homo sapiens
cacaacttcacttctctggatgttgtctttgttatgcggaaaccagctttcctcatgctgctgctgttcccctccctttgtgtttgcccaaagtatgcatgcaaaccagacccttaatttcccagaggaaaacagctataagcaaactattaggagaaggttattgaaaatttgcagataacaaatggagttacaatgcaggaaacaacatcaatgacaacaatgtaatgtaacatgggcaccaaaaccagacactatgctcccctaacacacaggccacttccctagaagtttctcttttcattcattagctttagccagtcgccatgctccaggggtcagcctaccttccttttctctgaaattgccctgtagcacatgtcctctgtttggaagctaaatgatcacagctctgagattcctggagaaattgaaactccaatttttttataaaaagactataagcttcagagatgcaattctgtccataatgatgaaaatatttaaccttataacacagatactatagccgtataatccctggaatctgtccatctcagcataaaatccttgctttatctctgcatggagataacaacttcaaccaaggggccactaccaggcctcagagacgaattccagtctcctatttagaaagaaaataactactcataattttagaaattgcaacctcttacaaatggattttggccatcccaactatccttcttaaacattttaataagccactgagaattaatataactgtagaatgttgctgttgaatattagtgtagagtcaggttttatctcaccttgtatgcaccaatacagccacattatttatggtcatgccagtttttaaagtggtgtccatctgattggtcaattgtttgttctgattagccagtcttatgttgtaccagttgttacaaactttgaataacatctggccttagagatcatataatttggggtctggaaatatatgttatgtttgctgttattcctggggccttgaacgacattacttatctacttatttgtcttctctgggtctggacatggctttatgatccttttcattgcagctttccaggcagctcctatgaattgatcagccttggaatgcgggagaatatctatttgtcctcccagatctagtcgaaacccattatctttcagatgaggctttgtccaccagacaaaaaaa

SEQ ID NO: 1015 - DNA, 1213 bp, Homo sapiens; identical to SEQ ID NO: 1014

SEQ ID NO: 1016 - DNA, 497 bp, Homo sapiens
gcttgctgataaacatattctaccataattctatttaatttcagagaagagggtatattctatgattagaatacatttctgaagacctcctcaagtcatgtaacaggcatacaaaaagctctgtactgcaatgtaagttccctttagacctttacttagaaactatgtgacaacttccatgattcaggaacagtactgcagttgaaaaataacacgcctgtaatcccagcactttgggaggctgaggcaggtggatcacgtgaggtcaggagtttgaggccagcctggctaacatggtgaaaccccatctctactaaaaatacaaaaattagccaggtgtggtggcaggtgcctgtattcccagttacttgggaggctgaggcagaagaatcacttgaaactggagggcggaggttgcaatgagccaagatcgtgccactgcactccagcctggtacagcgtgagactccatctccaaaaaaaaaaaaaaaaaaaaa

SEQ ID NO: 1017 - DNA, 497 bp, Homo sapiens; identical to SEQ ID NO: 1016

SEQ ID NO: 1018 - DNA, 18385 bp, Homo sapiens
cgcggagacccgccccagaggctcaagaaaacccgcgggagcctcgcccggacccaggaactcgtgctcggggccaaccggctgggccgcgatcgcgtttcgtccggggccgcggcggccgtggggaatcggctgcagcgaatcggtggcgcgcggcgcctgagcgcgctgcagtcacccgggagccgggtccaggtcgggttgggggtcggggatcggggatcgggggtccggttgggtcgggttgggctccaggtctggttgggtcgggtccaggtcgggtaggagtccggtcggggtccgggtacaggtcggggtccgggcctggatcgggggcgggtccgcgtgcggctcctctagccccgaacccgtgttccccgtaagctgttggtttctaaggggcggaggaatggcgactggagccacctctcaccgctcagggagccgggagggccggcagctcccgcgggccgagtttcccgccttgggtgcgaggacgcgtggggccgcgctgtgcccggggaacactcaccagcatctctagcctccacctccctctcgcgccagtggcactcccggttgagacaactgagaatgttccctgggcacagtggcccgggttgagaagccctgcagtggctggtagcgttggggtccgagcggaggagcgaactctgggtggaaaccggcaggcactggaggggaaggaggcgggacagggttgggtgggaccagggttgaggggtgtggggtctcggggcgctcaccgaggggcttcctgagcttgtgtggattatttccgtgccccaagctgagccctgtgtccatgtcacaggtcgtcttcccgtgacgcccagatctgtcctgcaggatggagccagcaccctcagaggttcgactcgccgtccgggaagccattcatgccctctcgtcttcggaggatggcggccacatcttctgcaccctggagtccctgaagcggtatctcggtgagatggagcctccagcgctcccgagggagaaggaggagtttgcctcggcccacttctcgcctgtcctcagatgtcttgccagcaggctgagcccagcctggctggagctgctgccccatggccgcctggaggagctgtgggccagcttcttcctggagggcccggcggaccaagccttcctggtgttgatggagaccatcgagggtgctgcggggtgagtgggctgggcccatcctggggttgccggtagcctcagaagtgatgagagtggcttgaaggactggaccaagagcctctctagtccctgtgaggggctagagagagagcctgctcctggctgaacccctgaacagaagaagcggtctgtgtctgtctcctttgcgacgggaggcacctgctgtgtctcacaaagtcccccacttgctccccgtccggctgtgtcagagagggatggggtgggagtgttcacatcccaggcggcagaggcagcccgtcagctggggacgttccaggttttccagggaagcacagctgtcatcactgacacgtgtcccatgtggactcccagccccagccggctcccaggctcagcctcagatcacactgcagtccttgccgggacactgcatcttgagaagctgggttttcagaggttgctgtgatcaaagcaagcactgagttatccgcgtcagcagcaggggaggggtgtccagtgagactccaggttggggaagccgctcagggccccgagagctctcacacagtaatcgcagttatttaggaatggattaacagattttcccatccggcttgtggttttggacttcacgctggttatgttgttggggctgcccgtgtaatccgggctgctggttccttgtggcaggaagggggccccgaggatgggggttggcggctctgcccaacacgcccgtatcttcagccccagcttccggctgatgaagatggcgcggctgctggccagattcctgcgcgagggccggctggcagtgctgatggaggcgcagtgtcggcagcagacgcagcccggcttcatcctgctccgggagacgctgctgggcaaggtggtggccctgcccgatcacctgggcaaccgcctgcagcaggagaacttggccgagttcttcccccagaactacttccgcctgctcggcgaggaggtcgtccgggtgctgcaggcggttgtggactctctccaaggtgaggccctgcctcggggaccccctttgccacccgtcttcttgggtcctcgtcccctgccaccctctggtgcctcacggcctctggagactttggagtctctggttgatgccgtcaggcaggtggggatgtccctgtcccgcacagtagtgaccggcagggctcatccgctgtgggctgaagtccgctgccctccacgcgggcttctcttgtccctgcagtcccttgggtttccagggcccaactgtgctgtggtggccaggtgggggatctcgaggttctcaggtctggaggcagacgctggcggtgccctggagagggggtgctgtgggaacggccttgcccgctgctgggctgcagggccccgtgagcgcccatgctcgctctgttttccctggggcgccagatggcggctgccgcgagtgtgcgtttcactagcgagaaggaggctgggccgggggcctgcacagcacccggagcgtctgcctctccctgcagggtgaccccttccttctcttgcctttcccgagctccaggcgacagctcagacgcaggtcgagcacctgggtccggactccaccctccacatgctgccccgacctcgttctgaaactccctccctcgctcaggggcaccctggggtcctggagcagctcggcgccccctcagagcccaggaggaagccgggcccctcgagtccctgcgtggggcctgtgtggcccaagccccctcgcctcacctgggggttcctgcagcaacctcctgagcccctcctgtcttttccgaacgtagccctaggcttgcagctgctgctgtgcatgggcccatgtattaaggaggctttgggaacatctcggacacatgtggaatgcggctttttcacgtgttcggggttggctggggccgtcctggtccccacgcggctctgtgctttccgctgccccgcgtcccagctcttctgtggggctggtacagcccggcccctcccggttccccacgttccctggagtgcgctccttccctgtgggcggccgtggtggtggtgctgctccagggtctcatgcccggctcagggcccaggcctaccctgcgtggctgacccaacttggccgggccctatcgatgctttctctccttcctcggcaacatcataccggtcccgacctcctacaccatcgtgacgattaagtgggctaagatgggtgaaggtttgaaaggattgtgatttgcttgtcaggttccacgcactcctgttcagatttgctgggtaggctgatgggcaccagccgttgttttgagtgagttttgctgtcggttggagtccgcctgaccgagagcagctctccccacacctagatgttcttttgtgccttcccgccggcttcctcatcaggcctccctttctgtcccaggtggcctggattcctccgtgtccttcgtgtctcaggtccttgggaaagcctgtgtccacgggaggcagcgtgagtagagcagtgccttcctgcccatcctgccccgaccctcacagcccatcagccttctgcagaaggccgagaatccctcctgaccctggccctctgcagggtccccttgcccggtcctgtcctgggcccgtgggatctggggctcagctgtgcttactggggagctgtgggactgtccttgctggacccacacagccccagacaccaggtgggtgcagctccccaggctcaggtcctccgtctgtcccctcagaggagatcctgggcgtgctggtaccccggctggcagcgctcacccagggcagctacctgcaccagcgcgtctgctggcgcctggtggagcaagtgccggaccgggccatggaggctgtgctgaccgggctggtggaggccgcactggggtaagcagccaggctgtcctccagctgcactggcttctggggtctggacccccagaggctgccattccttcacgctacttctcctgggcgccgtgctgcagctggcacccccatgtaggtgccacagggtgtgggtggtgccctctcagttcccgcacgtgctgatggtgacctctgtatcagagggtccctttctcttatgaaatagcatcgatgctgtgaacagcccacaccgtaaaggcgcctgtaccttgggccgtccacccgtcctgcgcctgtggtccccctcgcacacgtgtgcaccatgtccaggctctgacatggtgatgggcggtgactcacttccccacgtctttgtgcaggagaatcaaggttgcatttctggaagcaggactgccggccatttacccccacaaaccctgccagctcacctgcctcagatgtctcccctcccttcaacgtgtgcaaggacatacctgtctctgcccaaagtatttcctcctcttttttttttttttttctttttgagatggagtcttgctctgtcacccaggctggactgcaacggtgcaatcggctcactgcaacctccgtctcctgggttcaagtgattctcctgcctcagcctcctgagtagctaggactacaggcgcccgccaccacacccggctaatttttgtatttttagtatagacggggttttgccatgttggccaggctggtgttgaactcctggcctcaagcaatccacccacctcggcttcccaaagtgttgggattataggcgtgagcccctgcacccggctgactttgcattcttgattctgggtgagggtgtgtgtgtgtttaaggcatttgtattcttttctctgtgaactatataatcatgtaatcacattctattttatagtttgttttggtgttgttgttgggggggattgtttttagagacaggatcttgctctgtctcccaggctgcagtgcagtggtgtgattatagctcactgcagcctcgacctcctgggctccagcgatcttcccacctcagcctcctgagtagcgggaacacaggtgcgcgctatcatacccagctaatttttaaattttttgtagcgacggggctcactttgttgcccggctggtctcaaactcctggccttaagtgatcctcctgccttggcctcccaaatgtttttttaaccgttatttctttgtgtggaattttaagtgataagtgagggagaaatccagccatatctgtttccacactggctggatagacttgtggggctctttctggagacccataacctctcaccgggaggactctttcagtctggaccaggggcctacaggctacttggacaaaatttggcccgctgcatgtttttgtaaataaaatttttttggcactgtcaaaggaggccttcgagggtggacccgcctccgcccgggctgaggtgcagggaaggaggctgtcgggggtggacccgcctccgcccgggctgcggtgcacgcgctctctgggttgtggcatttatgccccagagaagggaggatgaaggcccagctcaggcagtcggaggatggaaccagaggctcgtggctaggaattggcaggccgggagtcaggccgccgtctgtgggcatcggagttcacgctctcgctcctccctgtctccaggccggcttgcagctctggcccctgactctgtcttgcaggcctgaggtcctttcgagactgctggggaacctggtggtgaagaacaagaaggcccagtttgtgatgacccagaagcttctgttcttacagtcccggctcacggtgaggacgccacggagggtgcaggctgctggctgccccatcacagcaagaatggctgcaaaacatggggtcggagcggtgtctgctgcctgggagaccctgcctgtgatttggcagtggctggcaggagttggcgaggcggtgggtgcctccctgccctgatgacaggccctgctgtgacggctctgagtgagggcttctcatgtgtcaatcttctagactcccgagaagccacccgccctagctgcgttctgtgccaggggcctgagggggtggggtggggtgggtgggggataggtgaggacacagaggaggtcgtgcatttccgggacttatgactcccgtccccatggcctggagcccggagggggtgagccaggtcccctgagcccagagtgggtgagccgggtcccctgactcccggccacatcttgcttcaccctcctcctttgctcacacgagaacttaagatggcgaggccctgccccagcacggcagcagctgcatcctacgtttttatatggaaccgttttatcacgttcagttcaaaggaatagaggcgggtgggtcgcttgagcccagggggcagcttctgcgggaggggaggggtcccgcattccaggaggcagtggccgcccccatgcttgtccgtctgctgccctcagtctggtcccagtcctggcatggctcttggccttgggagccccgggctggccaggcggcggcctcagcccagtggacaggcatgtgcttttattgcagacgcccatgctgcagagcctgctgggccatctggccatggacagccagcggcgcccgctcctgctgcaggtacgtgcctcctggctctccgtccctgcgaggccctgggagaagagccgtgcggggctcaccttttgggcggcagggtgaggctggctgggctggggcggagctccctcagagtggctgtgggcctggcggggacagactggccccgagccccacacagtcgtgggccatgccacctgcaggtgctgaaggagctgttggagacgtggggcagcagcagtgccatccgccacactcccctgccgcagcagcgccacgtcagcaaggctgtcctcatctgcctggcgcaactcggggagccggaactgcgggacagccgggatggtgagcgggtggtttgggctccccccggcctcgggcgccccgaggtgctcagggggcctgtccggtgcttgcagaactgctggccagcatgatggcgggcgtgaagtgccgcctggacagtagcctgccccccgtgcgacgcctgggcatgatcgtggcagaggtcgttagtgcccggatccaccccgaggggcctcccctgaaattccaggtgagcgggccgtcccctccgcgtccccgtgtggctggcccgggtctcccgagcggctgcctctccagccccagggtcaccgcctcttcccggggtccagacttgcggagcgtccgtgtggacttctcgcagggctgaggctggaagctgtggcaggttctcagccctgagctcctggggccacacagggtcgggtgagcacagggcccccagaaggattgcctggacacgttcacagactctctctagacgggggcccgagggaggctggggttaagggggccaccccctgcagtttgtccggccggggctgcagggcagccaggtcgctctgggtcggtggccgtgggtgtcagcctctctgctgccggctgcctggccatggaggagccctgtctgccttcaggctgtggaggtgacggcctgtcctcttatctgctgagaacctgggatctctctggggcattggccttgggggaggcccagctccttcgagaggggccacggcccctcagctttgagcactcccagtgctacccttggcctgaggtggaatcttagaaagtcgcttttaaaaagacacctggctatccagggcccagccactgagtgagaccgggctgcgagggaggccacagtggggagtggctcccgtggctccgtctcggggaggggcgctgcagcctggcggatgccgctgagcctgctcccctgctgtagtacgaagaggatgaactgagcctcgagctgctggccttggcctccccccagcctgcgggtgacggcgcctcggaggcggggtgagggtctctgccccccgggaccccaccgcgtgcacatcttactgctctggattccgctgccgggatgggaggggggaaaccctttctttctgtcctgtgagtcctgagaccagaggctcgaggggcccctaaaggatttttgttccttgtttccttaaagcacgtccctcgttccagccacggcagagccccctgcagagacccccgcagagatcgtggatggcggcgtcccccaagcacagctggcgggctctgactcggacctggacaggtaggggctctgccaccccagtgggcagcgtgcaggaggccgggaggcgaacccctcacactccaagctgcggccccgtggggggctccctgcctgctccgtgcttcttctctttcgtcctcatgtgagggcccgcagctcccagctccaccgtaggcgcaggggccgaggcgtgagctccgcatcttggggaggagagaggggctggctctgccgttgggcacttcctgtcacaggccatgggctgctcatgtctgctttgctctcccacagcgatgatgagtttgtcccctacgacatgtcgggggacagagagctgaagagcagcaaggctcctgcctacgtccgggactgcgtggaaggtgggcacgggcccctggagggccttgctgggctgggcatgggtcccgctcacagcctggttctgcctcaaggggccaccgggaagccctgggcccggggtgccgcccgtgctgctggctctcatgggttcagggtcagggctgaggctgaccgaggcctctctgggttctgtgcagccctgaccacgtctgaggacatagagcgctgggaggcagccctgcgggcccttgagggcctggtctacaggagccccacagccactcgggaggtgagtggggggcgggagtgggtggggaggcccaagatggtagctccctcaatgccatctgtgtcctggccactgagggtgacatatggctcccgtgtgtgacagggctgctgcctctcccggggggcctgcggcctggggcctctgctggggtgggtggctccggccctgtgagcctcggtgaggcctcggcgggcagctgggtccgacaggtttcccagccctaacccctgcgtgcaggtgagcgtggagctggccaaggtgcttctgcatctggaggagaagacctgtgtggtgggatttgcagggctgcgccagagagccctggtggccgtcacggtcacagacccggccccggtgagttcccgcacccgtggccctggccagtgcaggcacagcgggaagcactgggagctgcggtgcctgagtctcggtcctgtgctggagctggctgtgaggtgcccggaggtcgccccgggtggccctcaggtcccggaccacagcagcctctcccctgtgtcctcaggtggccgactatctgacctcacagttctatgccctcaactacagcctccggcagcgcatggacatcctggatgtaagtgcctcctgggcctcagtccccctggtctggcccaagctgccctaaggtggggctgccaaaacctgggtctccttgttgctgggccccaagggctcgtgcaggcctgtccactgccttcgtgagtgtgtgacccggcaggactcagcagtgggggagtcagggctcccggggcagagagttttgtttgtttaaaataacagctttactgatataattcacacgccataaaattcaccgctttagggtaaaatgtgtgctgcgcaggtgagggaatattatttagcaatgaaaaagaaaaatttgaatcccagcactggaaggctgaggcgggaggatcgctggagcccaggagttcgagacccgcttgggcaccacaatgagactccatctttattagccaagtgtggtggtgggcgactgtggtcccagttactcgggaggctggggtgggaggatccctcgaacccaggaggtggaggccgcagtggagctgtttgcaccaccgcactcccgtgtgggtgagagagggagacactgtctcaaagataattcgactctgatacgcactgccacacgatgagccttgagaacatttagttaaagcagccccagggcctgtatatcgttcgatttcacttaagcgagccgtccggaggagctagttcacggagagcggacggggctgccggggcttggggaggggatgtggagtgagggtttcacggggacagtttcagcttgggaaggcaaaagagttctggcgagggcggaggtgatggttgcccatcatgaacgtacttattaatgccacggaactgtacacttaaagatggggaaaacgggctgggcgcggcggctcatgcctgtcatcccagtgctgtgggagaccaaagtgggaggattgctcaagcccaggagtttgagatcaacctggtcaacatagcaagaccctgtcatctccaccagaagaaaattagctgggagtggggcgcctgtggtccctgctactcttgaggctgaggcaggaggatggcttgagcccagaggttgaggctgtcgtgagccgtgatggcaccactgccctgcagcctgggcaatagagcaagactctgtctctttaaaaaaaaaaaaaaaaaaaaaaagcagccggccacggcggctcacacctgtaatcccagcactttgggaggctaagccgggcggatcatgaggtcaggagttcaagaccagcctcgccaacatggtgaaaccctgtttctactaaaaacacaaaaaattagctgggcatggtggtgcatgcctgtagtcccagttacgtgggaggctgaggcaggagaattgcttggacctgggaggcggaggttgtggtgagtcaagatggcgccactgcactccagactgggcgacagagcgagactccatctcaaaaaaaaaaaaaaaaaaaaaagggaggggaggggttaacgtggtaaatcttgtatatattttaccacaataaagcaaaaaagactgagaacatgagaacaactcaccgtaactggtcttttttttttttttttttttttttgagacagagtctcgctctgtcgcccaggctggagtgcagtggcgcgatcttgactcactgcaagctccccctcccgggttcacgccattctcctgcctcagcctcccgagtagctgggactacaggcgcccgccaccacgcccggctaattttgtgtatttttagtagagacggggtttcactgtgttagccaggatggtctcaatctcctgacctcgtgatccgcccgcctcagccgtaactggttctaaggtgcacacttgggtggcgttcggaacatccacagtgtcacgcagccgcctctgtctagtcccagagcgtccttatcaccccagagggaaaccccatccctgtcagcagtcgccccgaccctcccagcctgggagcctccggtctggcgctggcctgttgagaaggtgtcctagagatggaggcgcacatgggtccttggtgccttctctgcaatgttctgaggtccccccgcccgtggcacgtgccgctgcagcgttgcttttgctgtgaggccgacttcctgggataagggcatgtggctctggcgtggcgggactgcgtggctttaggatgaggctgcgctcggccctgggcgtgttctcatctcctggagcacggtgcccaccttccccaccttcccgcctaccaaggcgcggttgctgtgagctacggggaagtgacttttctccttgttcccagaacacaccttctcccaggctgggcgggcccccgggcccgtttctggggctttggctgacttgactcttgggaaatgttcttccctggagcagtggcgacggccctgggcctgtctccctccaggtgctgactctggctgcccaggagctgtctaggcctgggtgcctcgggaggactccccaacctggctccccaagtcccaacaccccgtgcctgccagaggcagccgtctctcagcctggcagtgccgtggcgtctgactggcgggtggtggtggaggagcggatcagaagcaagacccagcggctctccaaggttagtggcgcctggtcagctcctcacgggcatggggaccgtgggtgggtgggaagggcggtcagacacctccaggcgctgtctgcagcgaggggcggccacattcgctggggatggtgcctttgccgggattcctgaaaggcagggtccatggtttgcaccgaggaactggattttggctgtaggagacccagactgggcttggggacatgataagtgacaggtgtcctggtggtgctctgtcctcagagcccatctaggccaggggtggtgttgctccacctgaggatgtttaggggcgtctggagatgtttttggttgtcactaggggtgggttggaggccacggaggcatcctgcagtgcccagggcggcctccccaggacgctcctccagccttgaatgtcctgcctgcaagttcgggaacgcctggtctgctgtccaggcattggccgcggagcctgagtcccgtcaccaaccccatggggcctgggagctgggcggggccggaagagtagcccggggaggcaaggcgaggctgaggtccacgctgctttgtgggatcctctcgggctaggggtgccgtgcccgctgcccaagcctgcacctccgtgatcgctgtagttgtgtctggcagggtggcccgaggcagggcccggcaggcagccccagcagattcaactccgtggccggccacttcttcttccccctccttcagcgctttgacaggtgagtgggttttccgtgggcctgtggacttgggggacagggaccctggacgtaccactgtggccaagaagttcgggctgggatctgagtgggtttgggtgtgaacagggtcgtgctttgctgtggctttttgtaagcctgtgttaaatggcagggagcgtcccgcaagattcctctgtggttgagctttgccatgaggcaccaggcatctgctccgatgctgggcttgtggcatggccggcagtgccgcccgcacgtgcccgacgccatcacctgctgggccctgctcgcctcctcctgcctcagccggcgctgcactggccccacgttcagggcgtgaggctctcgagatggcagagaagtgtggggcctgggttgtgctgcagcaggggtgggggtctcggcgttgggaactcctggcccaggtggacttgtgccagacagccctgcagggggagtaggcacccggaaatgtctgctcctacgatctcggtgcaggcaaggcggtgggcacgggaggaggggctgtgtggggctccctcggtctcccacggtggcccaggaggttggggacctggccctgaggcacccgctgcaccttgggctccatcctgtgctctaggcctctggtgaccttcgacctcttgggagaagaccagctggttctcggaaggctggcgcacaccttaggggccctgatgtgcctggctgttaacaccacggtgagccgggagaggtcgccgggcgccggcctgtgctaaccatggatcaggagcgctcctcagcctcacctgcgcccagggatgggtgtctgagggaggggctgcctgtgtgggcccccgggcagcgggagcatcccctcggctgtcaggcaggccctgtccctgctgctgcccagcagcggaagccgcccatgggtgctgggatgtggggacggcgtcgggaccccactgactgtccctctgctggtgtccaggtggctgtggccatgggcaaggccctgctggaattcgtgtgggcccttcgcttccacatcgatgcgtgagtggcctgtggggctgggccaggccaggggtgcaggcagacacaggggtcttattgtgggggccccgtggagcctcgaggtggctgacaggcagcctggcctggtacttcccaaataggaagtgtgccaggcagggccgcagcgtgggtggtctgccacactgaggggagtgggaggtctggggtgtggtccctgccgagctcagcccccgccttcttgccggcagctacgtgcgccaggggctgttgtcggccgtctcctccgtcctgctcagcctgcctgctgcgcgcctgctggaggacctgatggacgagctgctggaagcccggtcctggctggcgggtgagtgtcggcctgcggtgtgtgtgtgagatgtgtgtcggcccggggtgtgtgtgtatgtgtgtgtgtgtgtgtgagagatgtgtcggcccggggtgtgtgtgtgtgtgtgtgtgatgtgtgttggcccggggtgtgtgtgtgtgtgtgtgtgtgtgtgtgtgtgtgtgtgtgtgtgatgtgtgtcggcccggggtgtgtgtgtgtgtgtgggtgtgtgtgttgcagctcctgcaggccaggctgccatgactccttgggacccacacaggcagagtgtgcaggccggaggtgcagccaccccagcactggccgtttccctcctttggtcctgatcctagaccctgttggggtccctctgtgaccccgcccacccgcctccctgggcccctccggccggtgcagtcctggcaactttttgtttgtttgttttttagacagagtcttgctctgtcgcccaggctggagtgccgtggcacaatcttggctcactgcgacctccgcctcctgggttcaagcaattctcccgcctcagcctcctgagtagctgggattacaggtgcccaccactgcgcccagccaatttttgtatttttagtagagatgggatttcaccatgttggtcaggatggtctcaatctcctgacctcgtgatccacccgcctcagcctcccaaagtgctgggattacaggcgtgagccaccgcgcccggccagtcccagcaccttttgttgtttgctggcctttgtggtccagtggttggtttgtggggcccttaaggtggcttcatggataccgcctcggtttccacgtttgtcaggagggtcccgggtgatacgggtccttcccagggacttgtgctcagacctctgtgctggggggcgctgggggatgcttttggtgaggtcacctttcctttcccgtggggctgggctgtgtgcctcttctgccccagccatctcccctctccccacctgggcgcagtgccagcctgctgggtgtgaacgggtgtttcccatggggagtggagccaacgagtccccggggacgggctgaagagcagggcacggtaccgatggacacgggaagggcaggcccagctctgccctgtcccttcccaggacctgtgctcagggtggccgtgaatgtcttcccacggagcagctggagggtcctgggcccaaagcgtggggagtgctgtgctgggctttgcttctttcaaggggggtgaggccccccagacaccagacccttggagctgctgcccaacccctcctcagcatgctgtcgcccactcgccctgcctggaggaggagaggttcccctttggccagtggagccactgatggggctgggtgggcgggcacattccctgcagttcctggcccacctccttccccagagactcggtacctgcgacgtcatcatctgggggccttgggggcctgaagcaccaggaggagcaggggggccctgtccctcagccgatccctttccactcggctggcggggtcccgacagggtgttctcctttcacaggcacctcccacaagggtctacaggtgcctcctcaccctgcgattctagcccaatctggggaggagctgtggccagcagagcccccccaaggctccccggggccccaggctgcaggaggccttggtgagggtcccagcactgcgggcagccaagagctctggcagtgtgcggtcccagacacccaagaggcctccccacaggcgggtggcacgcccaccacccggattcctacggtcttccacctccgaccacagcccttgtctgccgtccagcaaggagcaggccctgctggtgttcccgggttccccggttgtgcgccccaccccaggcccctttcccatggctgcctgtcccgcggctcagggcagccctccatgtacagtgctgcctgcacagagcctgtggcatgcaggccccaaggccgtggggagagtccggggtcactgcagacccgagccccctttcttccatggagtcaggcctggcggggctggttcaggcagactgaagacaggaggagggagaatacgccctccacgctgcctcagctttgcttgtcactctcgtctggcagacgtggctgagaaagacccggacgaggactgcaggacgctggcactgagggccctgctgcttctgcagagactcaagaacaggctcctcccacccgcgtctccctagtccctggaggcctccccaggaccaccctcgccgacagcaaggcaggcggctgagcagcggcctggagcagcagagccaggctttgtagcgaggccaggtcttcggccgcatccggtacggagagtgcagatgcaggaaggcccggcctgccgctatttatagtgcagccagtccgctaaaaatacactgggcctgggcactgcccgccgggacatggcagcctggacgtggggctggggctgtgggcgctgctggcggggttgactcttccagtgagggcagaaccaggctggcaggaggggaggacggtgtacctgctgctcagagcccccaaggctctcctctgagagccaccaagcaggacagagcagctcttgtcccaggtccctcgggctgagcgccgtgtcaccaggagaatagtgctcacagcccaggcagggtgtgtggctcctggatgggctcgtggggcgggatgggacagggcacgggctctcagaaaataaactgctttattggaattacaggagtgttggtggccggtgggcagagcctagcagggggtgcagccgccaaggcccgggtgtcccagctgttgctcaggagccgtgggccctgcaggagtatggggaggatatgatgtgtggggagcaggggggcaggtgccccagccctccagctgcagcttcctgaggttctagaagtttctcaggctttacaatgtgtagttgggagaatacgatggaagggtgaacccgactcccttcaaaggaatgaatccaaaaatctagtggagctgccgggcacccagaggcaggtgggacagagcaaggtgcagacgggtcacaccctccgccggcccgggccgctgcgttctcgcccagctctgtcgcgtattccaacacagacatgttttttcccagcaaaaatgctggctttgccacagctgacaaaaaaattccagaagatgcctttctgcagcagcacgctggtcctggggcccaggcccctcaggggtcgtcatctgcctcttccaccacctcctcgtccagctccctggcgtcctccatgctgttgtggcggacctgctcggggacggtgcgtggcagtgggagacccagcccccggtgcacggcgtccacggcctgcgggctcacgtagtaggacatgttggccaagggaagccgccgccgcatctcctccaggaatctgtaggcctggggcagaggagcagacattactcagctttcctgaacaaccaggcacgaccctctgcctgcaggccaggcacgtgctgctgcccctggaggcgggtgggggtgcctccgcgctggaggacacggggtgcactgaggcttcccattggtgatgggggaatgtggtgatgaggggatgcggtgcccgcggaccgcacacatgccatgtgtggacactcaacaggaagcttcggtcagcatttcagctggaaatgcagagccagggccctggaaagtccctcagcagctgtgcacaggcctgctcaccgtgcgtgtgcgggcagagcctcctggggaggcagaggccccgcgttctgcactcgagtcttgcgggtggacatgcatatgtcagagtggagggcaggcagcgatatctactggtttggcttgggtattttttttttttgagatggagtctcagctatgaagatataataagcttgttggatggcccctcccatcacctggcagtggacctgcgtttaaggaaggcctcagctggggtgggcgctggtggagtgcaagccttccacacagtctcaaacgagaggctgagggcaaacatccacacctgaaaagatgctgccttacatgctgacaaaccac

SEQ ID NO: 1019 - DNA, 303 bp, Homo sapiens
tttttttttttgaaacagggtcttgctctgttgtccaggctggagtgcagtggcagtgaacatggctcactgcagcctcaacctcccgggctcaagccatcctcccacctcagcctcctgagtagctgggatcacaggctcatgacaccgtgcctggctaatttttaaattttttgtagagacagggtctcactatttttcccattcttgaacttctgggtgcaaacgattctcccacctcagcttcccagtgctggaattaccggcgtgagccaccgggcccggcctctgccagtttttctg

SEQ ID NO: 1020 - DNA, 126 bp, Homo sapiens
ccgggcgcggtggctcacgcctgtaatcccagcactttgggaggccgaggtgggcggatcacgaggtcaggagatcaagaccatcctggctaacacggtgaaaccccgtctctactaaaaaataaa

SEQ ID NO: 1021 - DNA, 524 bp, Homo sapiens
tgtatatatgcacttctgaattcagatacgtgtcttattgtggtttatatttcctcataaaacagattttattgtatctttggtaaattcataaacttttcttatatttttctgatagattttaagctaaattatagttcaatttcaaaagaaggataatttagtgttatgaacttcacaacatctaatcaggagatctacatctttatttgtaatgttttagaaaacatatatctgattattcccaatatatatgtgagttgatgatgtgtttgtaaacctctgaaattgtttttcaatattatattcatgtctatttcaggaagacttcttagatctaacagtagcagtcaaaaatgtatccggtttggaagatgctctctggaacatgtatgtagaagaggaagtttttgattgtgacaacttgtaccactgtggaacttgtgacaggctggttaaagcagcaaaggtaaagacagataactgctttttcccagggtccccactttgtagttagtacaagt

SEQ ID NO: 1022 - DNA, 8746 bp, Homo sapiens
ctgtcataaatttcctgtcttcttgtcttgctagatcggggcagcagtgcttagggcgggcctcagaggctcacacacgtatcgccagggggagaaccagctctctccggcttggactcggggcggctccccgcctgcagccccggaagcgcatcctcaccttccctcgccttcctgttcctggcggagccgggctccgctcgtcttctctgtcttagggctggtgctggccctgcccacgcctagggctccggcgcgtcacgggcctcagctgggattcccgcgcccctcggacggccacgagactcgggtaagtgcctcacagactttgtgcgctaccccggaaaatgaggggcgtggtggggggggtcccgccgccctccgtatacttaggaccctcctgccagctggccccggtcatgattaggggccttgggccccgtcagccccgcctgtcttcccgtctccagagtaatcgcagcatctctcctgagctccgagtgtgaatccctgggaaaagctgaatccagaggtggggtcacagagagccgcaggcccgaccgggatgagaagtcctaatcggcgttctaggggcgttctaaaagaaggaaggaaggggatttgaaaggattgctcccgcagggctgtggccttaaagaggtggtgactggcaggttggactgacctgccgtgggctctcccttcctccccaatttaccttcgagaaaccctcgttgaggagacacccaagggctgagtcctcctccactttgaccttttgctattccatcacaaagaaaaaatggatcccaaagttaagaaatggaccagcacttgtttagaatcaggactggtgccttggtgtttggcctcttacctctgccacatggcttgcttacaagttaatcggattaatcaaacgcttttatgagaaagttttgttgtgtcacctggcagcctcgggtgttccctaagagggatttctttcttagatgtattactactttttctagggattagccaagcctagcctctcagatcatattgctccaggttccctcaaatgactaataagaatgtgatgtgtttgtttttgtttgtttgtttttgagacggagtctcactctgttgtccaggctggggtgcaatggtgcgatctcgctcactgcaacctccacctcgattcttgtgcctcaggctcccgagcagctgggactacaggtgtgtaacactacacccggataatttttgtatttttagttggagacggagtttcaccatattggccaggctggtctcaaactcctgacctcaagtgatccgcccgcctcggcctcccaaagtgctgagattacaggcatgagccaccgcgcccaaccgaatgtgatatttttatgaccatgagaaaagaagggctgcattctttggtgggtccgcaaaattaaaaaaaaaaaaaaaaaaagaaaagaaaagaaagaaaaggacaatgttaatgagctgttttctttttatcattttcttaaacaggctgcttgggtagacgttgacttgaaaggtccattcttttgtcatcttgctggttcccttaacaagacaacaccttggctagcaagataatatcttggttagcaagacaataaacttgggcatgtgctcaacagcaacctgtctaatacattttcatttaaaatcccctctgtactactcagaaatataagcaagttattatggtgcccagaaagggggcaaaggttccagggtcctaggagatgacaaggatttatcctcttcatctttctccgatcccagttagcaggaatactttagcctggaaggtgagtgtgcccctaaccaacctttacagatgggtgactgtttgggagcttatggctcactccttctctttaaagcagatgcattctggcaagctgcagcagcaaacctacccttttagacaccctgcgttttctcatctttcctttctacccctgcatctcccagtctctctcacttaacctccgtggaaactcatgctgcgtctctaatactttggaagatgaagaacaaacgccctggagagtgactgacaccatgtgacctcttgcttctgtagcacactgcatcttgcctgtgaatctttttttttttttcttttttttttgagaccgggtcttgctctgtcacccaggctggagtgcagtggcacaatcttggctcactgcaacctccgcctcccaggctcaagtgattctcctgcctcagcttcccaagtagttgggactataggcatatgccaccacacccagctaatttttgtatttttagtagaaatgggtttcaccatgttggccaggctggtcttgaactcctgacctcaagtgatccacctgcctccacctcccaaagtgctgggattacaggcgtgagccaccacgcccagcatttgcctgtgcattttttattgtattttaattatatcctttattctctccttcctaagcttggtgttcttaactttcttccagatcttccctccaacccccaaacacgatctctccttaagtaagaggcagggagggagaggggaaccttctgatttcggggtgggattgaggctaaaacccaagttagaactacctcccagaaacccagttccgtatccatcgagtgatcaaaaagatgctgctaaaatgtgccttgtgtttgctagggatgaggtgaaaatgagtattgaatgaggtggcattttggtccatggatttgcttgctatgaaagagaaaaaacatggaaaaatatattttgagagctgggtgagacccccaaattaatctaatccaagatgtttccctagtcattacattcctttttttttgaaacagaatctcactctattgcccaggctggagtgcagtggcgcaatctcggctcactgcaacctctgcctcccgggttcaagcaattctcctgcctcagcatccttagtagctgggattacaggcacgcaccaccacccatggctaattttgtatttttagtagagatagggtttcaccatgttggccaggctggtctcgaacttctgaccaccttggcctcccaaagttctgggattacaggcgtgagccaccacgccctgcctgagtcactaaattcttacactgttccctcctatgttagtccgctagggctgccgaaacaaggtaccacaggctgagtgacttaaacaacaaaaattaattttctttgacttctggaggatagaagtccaagatcaagatgtcggcaggtttggtttcttctgaggcctctccttggcttgcagatggccacctcccactacatccttagatgtgttcctctatgttgtctgtatcctaatctcctcttcctataagtacaccagtaatattgaattagggcccacccataataccctattttgctttttatttcactattagttttttttttaaagctatttttgccagttaatttaaacatcatgatcttcttctaatgataaaaatgcaagtcttcatgctaacaaaaggattggaagaaggatgaagcagatgtttcttctcccctacagcaatctggttaaatgaggagttaaattgagagctttcatgagaatttcagtccagttctgtgcaatgaagacgagtgattcaaaactttcactaacttgctctgttgtttgtaatataatgttattggaagagttattttaacaaaggggaactgttatatttctaaaacttttaaaattgttgccatgtcttgggaaaataacttcagtatctgtcttgataatttcttgccctgatgataccattgaaagtcatttctctatgtttccaaaagttgtacaattactagtaagatttatctgccagttaataatttttcttttcttccacatgcatgaaggagtatttgtaatgacttttatattttatcattaacattatttttttgaactcttaaaatgcgtattttttttttacattaatagacttccttttttcagagcaatttttggtttacagaaaattgagcagaagatacagagttcccacatacttcctttcccccacctcagtttctcctaagttattaacaacttacactggtgtggtacatttgttacaaatgatgaactaatattgatagcttattattaactaaaatatatagtttacatcagggttcactcactgtatgaagttctgtgggttttgtcaagtgcataacatctaccattttataatatatgccattacagtagcatacaaaagagtttcatttacctaaaaatctcttctgcgccacctcaaataatttcttctgagttaaaaccactgtgtggtgagagctccttccttttccaacctccttgtcctttatggaaatggtaagagcttttacccatctctctggtcccttttcattatgtgtgtatctgtctcccacatttgtaaggtctctagagagtcagtgacctggtctcctaatcagcttcctaaaggtgagtttcaagaattaaatccgtatttatatactcagatacagcatccaggcagtggcctatttttcctgattttattttgtcacctgctgtattttggcctttgacatgtggagatcatggcccccctacttcggatggacttcaatggatctaactcgaagaagactgaacccaggaaaagagactgtgtgagcattctcacaccaggaaatgggctgagaaacaattttggagtgagatggaaggagaatggtatggagtatctattcttagggaaatgtgtgctaggccaaaatctcactttttggttaaacactctcattctctgataacataaaggcctctaaaaatatatgcagaatatttggggtaaccttattattcattgcccaagttaggtcacctttcaaagtaaaagggaacattatgaataattatactagggcaacaggtataaatcaagtcaccctaccattagaccaagtgattttcactggttccttcattgtaagagtaactccttttgtttcctaaaaattgttaaaatgattccttaatgttgcatttgaaataaagggaaaaagacaaaaattagcaataaattcatgtaatgtctaggcaaggatttcttcagaagagagcaggtcaggtgtagttagatcagtagaactgtatgtctcagtggcaccattaccttttttttttttttttttgaagcagagtctcactctgtcccccaggctggagtgcagtggcacaatctcggctcactgcaacctccgcctcccaggttcaagcaattctcaggtggatcacctgatgtcaggagttcgagactagcctggccaacacggtgaaaccctgtctctagtaaaaatacaaaaattggctgggtatggtggcgtgcgcctgtaatcccagctacccaggaggctgaggcaggagaattgcttgaacccgggaggcagaggttgcagtgagccgagatcgcaccactgcactccagcctgggtgacagaacgagactctgagactctatctcaaaaaaaaaaaaaaaaaaaaaaaaaaactggagcaatttggagacaagattaaaaaaataataataacattgtagaatggtggccactcacaaggttacagaatttcccagtaaatgttttcaagggtggggcagaaggtatgatagacaaaagctttaaaaaagtcacacagtgcccatgaatgccagccctaggcctaagtcctaattactcaaactcaaactattttccatttcctacctgtgtggctctcaatctgtgctctgggctacccacattttttagtacttttattaattcttgagcagacacatacaatttttctgtgtaagacataggtaatactccagccatgtgcttcccctacagtttaaagaagagaatgcaacctcccccatctctggactaacctccatgccttctccaactacatccctttcccaactcccaagagatgaccactgtccaatttttatttatccctttttttttaagttttactatatgtttgtggcctcaacatgtcatagttttacatgtgtaaatggatctatagtgtacatattcttctgcaacttgctatttttcttcggcattatattcttgagattcatcctcgtttttgaacctacctgtaatctatttgtttctgctgctgaatggtattcccttttatacatactaccaaaatatatgcatcccttctactattgaaggacatttgggtgatttacaggtttttgaaattacagtgttgctagaaacattcttgtggagatctcctgtccacacctccaagaatccctctaagtaaacacctagaagtaaaattgctttacacaataccactgtttgcagagtgctttacaaataaccactgtttccaaaagcaaatacactaattggcacacacacacagcagtacataagggttttgattgctccatatcagctgagcccttgatattgtcagacaacttggttttcctcagtttgatagatatgaaatgttatatcctatgcttttaatatgtacttcttatatatttttaggtgcttattcctcactcatgcttccaagaagtacctgttaacattttttgccatagttttaaaattttcattttgtcctttcctcatggatctataggaatgctttatgtattcaggattctaacattttgtccattatatattttacatatatctttgccaagctggtacttattgttttacttttattatgctatcttttttgatatacacgaattattaacaatatagtcaatttgatttttaacgtttacattcgtcagtctttccctttatggtttacgctttttgtgtcttgttaaagacatctttccaggaacagcgtgaggaggacagaagcacccaacaggactgctcaagccacctgcgaacactgctgctaccatgcccaagagaaaggcaaaaggagatgctaaaggtgataaagcaaaggtgaaggatgagccacagaggagatcagctcggttgtctgctaaaccagctcctccaaaaccagagcccaggcctaaaaaggcctctgcaaagaagggagagaagcttcccaaagggagaaaggggaaagcagatgctggaaaggatgggaacaaccctgcaaaaaaccgagatgcctctacactccagtcccagaaagcggaaggcactggggatgccaagtgaaatgtacatttttgagagctctgtacttatagtgactctactgtttgaaatactatttttttaaatcaagttttataaaagtgtagaattttggcttttttaagttatgttgttagcacacaggacacttccttgttgtcttttgtggaaagggcaagtaccactaatagggtgtatctcagaaactgaattgaaataagggaaaataggattttctgtcctggtttttgaagattgttcttgattcccttgattcccaggagagattctctgacattcacgtgtcagccactttggcacggaagccttacagtgtggggaaccaaaacttcgtgtctcccctttccccgatgccatcagcatagacttgacttccttaaaccgagagttttgatgtggccttggcaaccctaaaatcagctgtgttaggtaacaaaactcaggctttctgttgatgacatcgagatggtgtcacttaaaagagccaagattcctgttttcagtttgtggattcatcctgctggttttactttagtccctccatgtcaaagtgggcctgagaaaagctcatacatgcctcatgtgaagtgtccaccctctctgaaaatctttcttgttcaaaacagcaacgacatatcttgttaacttttacggtgacttttggaggaggggagtttggaaattgtaaaatgttatagattgttgcctatttcctgctgaaagtaaatgtttttaaaaagtatcatataaagctgaatacaaattggtttggggggagatcctttcctacccaaagtcataaatatattctttactgccttgtggaaattttatagttttgcctttcacatttgtctttagtctgtcctgaactgatttttgtgaaaattatgagttagaaattcaacttaacatttttcatattcgaagtggttgtctctgcactatttactgaaaagttcatcctttccccagtgatttgtaacactgcctctttcataaattaaatttttgtgtatgtgtgtgggtcttttgatggtttctattctgactgacatcaatttgtctaatcttgtagcagtacagtacagtcctgattattgcaactttaggaaaaggtctgataaaaaccaagatgcctccacattttgtcataattgtaaccaatttcacctctgtctccagtatcaccacaaaattgttcttccttggagtgtcttggctattcttagccaactgttcctccatattacttctagaattagaccaacaatttataaatcaaacaaacccaagagcattgaaattttgattggatttgtattgaatttatagattaatctggtaaaccatgtcatctttacaatgttgtcttccaatacatgaatatggtacagctcttcatttacttaggcctttgaaatatctttcaataaagtttataattttctccataaa

SEQ ID NO: 1023 - DNA, 140 bp, Homo sapiens
cattttctgtttttagctaatgttgatttcgatttttgtatccagcagccttgctacctctcattcttgtatctgcatattcttgtgggtttgtttgttttttttacatagacaaccatatattctgtgtatacaaacaa

SEQ ID NO: 1024 - DNA, 4172 bp, Homo sapiens
cccaggaccagccgcagccaccccagcacacgtggtgacagccaaggtgggcccgagggagatgcccaggcctcagggacagtgagtgtggtccagccagccccagcttggctgaccctggacaccgaggcagcaaagccctggcctgccctccagtggccagacgtgaggggctgggctgcttgtgacctgagtcccaggaaatgtgccagaacatgccggaagaacagagatggcagggaggagctgcctgcagcctgctgtgcccgagtctcctgttcctgccaaggggcagctgcaggctgggatcagagacaggagaggtgggatcctcttggggttgcagatgagtccaggtcctttagctttctcggaagcccatctcaggagcccctcccactcctaggaagcccctggcccctaggaagcacccccccaactcctaggaagaacccccctcccaaggaatgctccccatcccgggaagccccccaacaaaactcctaggaagctccccttccagggagcccctccctctcccaggaatcccatccccacacataggaagacccccactcctaggaaaccccccactcctaggaagccccccacttccaggaagccccccattcctaagaagtcccctcactcctaggaagccccctggactcctagagacccccccaactcttaggaagccccccccacactcctaagaagccccgtggactcctaggaactcccccaactctttggaagccttctgactcctaggaagccccccactcctaggaagccccctactcctaggaagccctgtcctaccagcttccctcccatcagaaagcctgggttagactcatgtctttttatactcagttgagtaggagtgagaagacagagccattcagagtgttctaggaccatgtgtccacctggcccaggacgcagcaccttgtcctgagggatgcaccctgcccattccctgtgtgtaggactgtgtgtgcacctggcccaggatgcagcaccctgtcctgagggatgcgtccagcccagtccctgtgtatgaggccctgaagagcttcctcattgccccagaaaggggacgtgagctctgctggtctctgagtgtccccacggccctgacggtggatgtgatgagatcaggtgggaccagccccagggctcagtcacccaggaccgcccagcatcacctacagtcacccagggccatccagggtcacaaaacatcacctagggcctcccagggccaggcattcctgtcactaagccactgtgtccgccattgcccttggagtgtctggtccaccaggaagggatggttggcctccatctctgaggatgtatgcaagctctgtggcctgtaacccagcgggaatcaccgtgctaatcccgcatctgcacagcaaggggccgttttatcagatgtcggggaatggagcaaaagcagtcaccgcactgagagcaagggggcggtgtgagcctcaggagatgccggtccgagaccagggccccagaagtgcagggaactgccctggggaggagccatgtcgggcagaacccagacacctgtgctcacggctgcctcctcccacagccactcgtcaggagccctgcacccaggtcaggaccagaggccagagcgccgaggccgtgcaccaggtagagtcccccccacgggccagaagccctggccctgctcctccacccccttctcctaggtcccctgtcaggggccctggggaccttcctaggcctatcagagggtccctcgactgacatccccagagacgcagcgggcaagtcagggagcagcaaggctctcgggcactggggcaggtggacgtgggtggaggcctcagcctcagggccgagtgagtcggctcactgtggggagggaggggtcctgcctggggctggggtggccgggccctgagtgtcaccgggccactgtaggcaggacccggacacctgggccctgcaacctgccatgcagcagactggctgccccgtccccttcgtccacctcctccacccggggcctagtgctgtgtgtgcagggctgctccaggcttcccccacttcctgtagagctactgagccttaggatcccccagaggagctagaggagaagcgagccagtggttcctggatgcccaggtggggaacaggtgggctcagggttcccagccaggctccgagttgccctccccaccccccaacccccgcccccggctccaccacaggagggtgaggccccctctggtcagccctgttcagaatccccctggaaagacacagaaaatcggttgtggctgattagttatcgtgatgctggatggagagagaagagggctgggcacgggaggctggatggagagagaagagggctgggcacgggaggcagatggagagagagaacagggctgggcacgagaggctgcatggagagagagaacagggctgggcacgagaggctgcatggagagagagaacagggctgggcacgggaggctggatggagagagaacagggctgggcacgggaggcggatggagagagagaacagggctgggcacgggaggctggatggagagagaacagggctgggcaccggaggctggatggagagagaacagggctgggcacgggaggagggaggggaggctgcaagtcctggcaggcgcgggcccatcccagtgggggcaatcccaaacccaggtcagcccactcagtggaggagacggctgcccgaagccgcctgagctctgggccagggactgtcactcttgaaagacgtattgattaaaaacaaggaaacacgcgtagaagggcaagtcagaccctggcgctgggcaatcttcggcgtggcctgcccctgcccctgccacctgccaccaggggcctcatctgcctcctgggagcacagtggtccaaggcagatctgaggggccacggcagccgagaagctcgggctggaggcttcacttaagggcgatgacgctgcccgctggccgcccacctggacgggaccttggacagtcacctctgaacccagacagtttcctcccgtataaaataggaggccgttcttgaccactgaggtgcttccagagctagtgttcaaggcccacactcagacctgatcctaaattacaccaaacgctaagagtccaggtccactgagttaaaaggcagaaagcagccccaggaaagaagctgggcaaggtgggggcctcctgaaatgcatcaaaggaagatgccaagcctctctcgcagaggtgtgtgctgggggacccgtccaggggcaggccggccatgcactgcggcgcagggtgggcattggcagggagtgtggctctgtggccacaagcagtgtggctgccgtgtgcggtggtgggagtgagagggggcagcaggcctcatcccatggcctctccccgcagatccaggaaatgacagccggggtcagtgaggagcagcacagccatggcctggacgacatgcagctgcaccagctggccctgcacccagcgcccacctcactcagccataccttccaccgcgccctggactgcaggctggcaggcccctgcgagaccagggccactctccccagcaagaggtccagcaactgtctcgccctggacctgttcggagaggctccaccacaggagtttgtggtgtaggcaccacccacccagcagtaccgtccgcaccgccaggctcagcccctgcccaccccacttccacatggccctcgtcccttcctgcccgccagatgctgcctgcacttccgcagccagcacgctccacaggttcacctgtaagaggtgtggagctggctctgacatcaacctgggaggtaacaaacaggtcccgcacctcatgcctgtctgccatacacccgggagctctttccctcagggtctcagggagccagttcaaggtctggctgtcaagtgtccagagagccatggtgttggcccctgaggcagcctgtcacccatcctaatctgggagagaaggtgacacagctgggcccagaccctggagagacagctctgcagtttcccacactgtcagctccccaagagacagtcctgatgggcacaggctgccagagctcccaagccggagttcacagtcat

SEQ ID NO: 1025 - DNA, 389 bp, Homo sapiens
gaaggccaccagggtagggtctccccagggctcctccccctgcacaacactcctgcacacgtgcaaacctgctgtcctctgcatttagaggaatggcccgtgcatccctgctagtctcaggcccatcccagagcactgagaggccacaatcgttcagccctgtgccctgaacaccactgcccccttcactgtctgtgtgtggtgaagaccacgccacaccaccctccagctcactggagacaagcatgagcttgagccccatggcctggtgcagggctgcgtgcattgaggccgcctctttgacgggtccatccagggggaccctctcctttctgtgaaagggaatcgtgtgtgtgccccaggcacgtgtaataaagaacccgagcaga

SEQ ID NO: 1026 - DNA, 118 bp, Homo sapiens
agatggagtttcactcttgttgctcagggtggagtgcaatggcacaatcttggctcactgcaacctccacctcctgggttcaaccaattctcctgcctcagcctcctgagtagctggg

SEQ ID NO: 1027 - DNA, 300 bp, Homo sapiens
aaacatctcaattttaaatgtttctttcaagatggtgaattaaacagagatagcccttcaacaggttgaactcagcatatgctgagtctgaaatggaaatgatgaagttagagaaccatacaacaatggtaatgatttcagaaacatggtgttgagcagaacaaagcagacacaaaagagtacctatggcatggcatgcatctgtatacgcgaaattccagaataagcaagctaacctatgataagaaagagactggctgggaagactgagagttcactttctggggtgacataatagtg

SEQ ID NO: 1028 - DNA, 385 bp, Homo sapiens
ccacccatatgtcgtcatgttcacttaattacatcttgaaagagcctatcttcaaatacagtcacattctgaggtccttagggttaggacttcaacatgaaattttgggacaacacaattcatcccctgtaagacctcaccctcaggaccttcaaaattcatgtctttcccacatgcacaatccattcacctcatcccaacagcccccaaattctcaacctgtttcagcatcaactgtaagtccaaaatctcatctaaatatcaacatctcaaatcaggtatgggttagacttgaagtatgattcatcctgaggcaaaaccctctccagctatgaactgtgaaaccagatgttttttgcttccaaaatacaactgtgagaaaagc

SEQ ID NO: 1029 - DNA, 6040 bp, Homo sapiens
cccagggagaggagaatgagccacgcgttccagagttgcaggatctccagggcaaagaagtgccccaggtctcctacttgggtgagtaatgattccagaactgagtggacagagtagggggaagggttgctggcagccggaggtgagcccactctctggcttctctctgcggcccctaattgccttcttcatttccccagactctatgtgggtcttgcatgtcttgccttgtccctgacttttcatagaaagaatggaggatcttaattttgccaggcattggaattgtactcccttggccaaggactgggaaataataggaatgtctttctcctctgcctgtaagtaacatctggtttgtgctgacaatgcagcagcccctccaggagtgaagtcagatactcatgacaagcctagttgcagagggagtgtctcctaactgggcaccgagcgcagccctttgaggtgcctcacctgtctagtcttcccatctgcctggtacaggggtgctgtgaggacactggggtgtggggaggtgctggggctcagcagcagcagtttccagccctccttcaggctgtgtcgccagcacttgcacccatgatctccatgccatggtgcttcgaagcatctgctccttcaggaggaaatagctttgtacagaatcatcagcagctccacaccttcttcccctttgggacctagagctggcatgaagcagacaaggttttgacacaccatccccacctggaacaagcgttcagagacttggtgtggtgcagtagctcctgtaccatctctaccctgtaggctctgcacaagctgtttgtgcaggatgtgcggagtgtgcaggagcctgtggtgatgactatagaaaaccctccacagaaagtgggaataaatatggggctgggggaagtgcttgtctctggccatagagtgggtggagtagaacccggatctacgtcgattctgtctagcgtcagagctcatgtttgtggagttggcccattttgccttcaggttcattcactcagcagacacttattgagtggccaccccctgccagtccccaggacggagcccagggccgcccccagatcgtagcctggcatctattcggatagcaccctcccaggtagtgctgtaggtgcaaaacaaatcaatttttccatttcctcctctggaaagactctccaagtctccagccattccaggtagaagaaagaaggaaacgtgaggagctgcaggtgccagagttccaggcctgcccacagacggtggtgcctcaaaacacctacccaggtaaagaagggtcagggaggtatgggtttgtccctgtgtgtctgtggtgtgtcgcatgaatgtatgtatgcatgtgtggcataggggatggttgtgttgaatgcatgtgtgcgtgcatacacatgtggtatatgtggtgtgctgcatgtgtgagtgtgtgcattcatgggtgcacctgtgtgttgggggcatgtgggtgtgtgatgtaaatgtgcagtggtgatggcatgggacagttaggaactgaacccctcaggatccccgccgacctctgctgtggtgttcttagctgcttgccctgattccgttgtgctggggtcattctccagctcactcccaatcccaggctcaccctccttgcctttcccaggggccggggagggtgtgtcaaagcagggtgctgctgtagtgctgttggtgatgcagtgagtgtttttcttctctcagcatggatggccagcatcctggcacagaatcttggaactgggattaaagagcaggtttctggcatactgaagctgcacaggactcttggaaagtgtatgttccattcctgctttcagagaaatagccacagtgtagactctgagtcgtcttggtaaaagtcaccacttccagaagcagaggctacaatactgccatctttctcttctcaatacaaaacccaagcctctgattcttacctgaacccacgtgtcattgtagttttctgcagctatggagaccaactcacacatattatctcttctacctgtgatgcttttgaaggcaagatttatgccattttgacccagctccatgcatcttgtacttggccccctttcatgcatggacaaaggggcttttctagtgtgggagatctgaaaggatgagatcctgctccacaagcatggatgcccacccctggttttctaagaagcccacctctgcgtgccaagagtgatgcattcatttggggtccacttggagttcaagcgcaggcctgatgtttgtggtgcactttgaatcttctctagcttctttctgcccatagcatgtctctcagccccatcaatatacttttagaagatggatggatgttcatttatacacaggagttttcaactccattcttcccttgctggactctgacacagactgctctgaaacagccagaagccaagggttgctactgagaaaggggagagacgatatatttcaaagagtgggcactgtacttattttggtagctcctgccagcttgccttcctaaaaggcttttcccgccagctgatgccggatagctggtgataaggtctgcttctctatatccatgcccacgcaggacactcccagatgttcagtttgtgccaatcaaataatgctactacatccgccactgaggtggaatatcttttcttgtttattgtgttctatgaattgcctagttagtattcatttatccttatttatttatttttgcactcatacttgttttctttatgtcctaaacattgcaccaggattcagtgatttacatgatgacatgattctgtgcattgtatcttcatggcaccttctgagataggtggcatgatgtctctgtattgtagctggggcacccgagagctgaagtcacttgcccagagtccagtgctcacaagctgtaggtggtggagtgaagatttgaactcaggctgggcgcagtggttcatgcctgtaatctcagcactttgggaggccgaggcgggcagatcgcctgaggttaggagttcaagaccagcctggccaacatggcgaaacctgtctctactaaaaatacaaaaattagccaggcacagtggcagacacctgtagtctcagctactggggaggctcaggcaggagaatcgcttgaacctgggaggtcaaggctgcagaaatcatgacactgcactccagtctggacaacagagcgagagtctgtctccaaaaaaaaaaagaaaaagaaaaaaaaaacggccaggtgcagtggctcacgcctgtaatcccagcacattgagaggctgaggcaggcagatcgctgaggtcaggagttcaagaccagcctggccaatatggcgaaaccccatctccactaaaaaatataaaaattaaccaggcgtggtggtgggcacctataatcccagctgcttgggaggctgaggcagagagaattgcttgaactcaggaggtagaggttgcagtgagccaagatcacgccactgcgctccagcctgggacacggagcaagactccatcttaaaaaaaaaaaaaaagatttgaactcaggctgtcaggcttcagacccatggcttttactctacattaccaaaccacggtttgctttttctgtggattcatagaaactgccatctttcataggttcttctaaataccaaatccaagtctctgattcttacctgaacccacgtgtcgttgtagttttgggtctgaatcccttgcctctgctgtattcatacatagtttcttccatttccctcaactttgtttatgtgtcttgcagcatataaatgttttgttttgttttgttttgttttttaaagatggggtctctttatgttgcctagactggtcttgaagtcttgggctcaagcagcctttctgctttggcttcccaaatagctggggagactacaggcgtgtgccatcatgcctggcttaaatgttttcttacagtttttaactgtaggtacacttattcgtcatctttttggttttatgccttgcttgagaaagcttccccattctaactttacaagaatattttacagtttttaataatgcctttatcattttggtttttcacatccagcttcctagtctcccctgctgttccccttaatcccctcagctcgcaggaagtcattcattcctggccagagcatccttcctgaggcgatagtcatggagttacctgcacgctgcatgcctttgccactccgcctgcaacaagcacttgcagcagcctggctgcctgctagctatgtggccacgagccctggtcccatctccactggctcaattcccctgaaaccttgggcaatttcacttttctgccttacattttttatttggaaaacagaaataatagttaaagctgccttgtacagttattgctaaggattaaatggtttaatgcatatactggcagttagaccaatagctcttttcttttttttcagatggagtctagctctgtcacccaggttagagaacagtggcgcgatcttggcttactgcaacctctgcctcccgtgttccagcaattttcctgcctcggcctcccaccatatgtgggagcccacccacccatatgtcgtcatgttcacttaattacatcttgaaagagcctatcttcaaatacagtcacattctgaggtccttagggttaggacttcaacatgaaattttgggacaacacaattcatcccctgtaagacctcaccctcaggaccttcaaaattcatgtctttcccacatgcacaatccattcacctcatcccaacagcccccaaattctcaacctgtttcagcatcaactgtaagtccaaaatctcatctaaatatcaacatctcaatcaggtatgggttagacttgaagtatgattaatcctgaggcaaaaccctctccagctatgaactgtgaaaccagatgttttttgcttccaaaatacaactgtgagaaaagcatagcatagaccattctcattccaaaatagagaaatccaagagaagaaagggtaatgggtcccaagcaagtcttaaatctagcaggtcagggctaggtgtggtgtggctcgtgcctataatcccagcactttgggaggccgaggcaggcggatcacctgaggtcagtagttcgagactgcactggcaaaaatggggaaaccctctctctactaaaaatacaaaaattagccagacgtggtggcacacacctgtaatcccagctactcaggaggctgaggcaggagaattgcttgaacccaggaggcagaggttgcagtgagccaagatcatgccattgcactccagcctgggcagcaagagcgaaaccccatctcaaaaaaaaaaaaaaaatctagcaggtcatttccatgggattttaaggctcagcaataacctctggctcagttctctgttctccaggcccagcaggctactggccctgctctttggaactcagaaggaaatgacttcacctcctgagcctgtactctctggtcccatgatgacagtggcagtcctgtaacctctgagccacctttggagtcattcttcccttttcttgaaggatagtacatattcatagccagatagatctatcggccagtttgtagaatcccagaagtcctagccttcttttatttcatcccatctcttttcctttcagttccagctggcagtgtttctgctggtatataatactcagaaaccctgccctccatgcagtccacagggttgcaggccgtcagacgagggtgtcctccatagaccttcctggataacctcatctctgttcctggcttctgttgagatggttgattggatccgtgaatcatacccagaatctctttaacaaatgatgagccagccacactcttggtgtctctccagtgcacgctttcttattttttgccgtatggatagacagaattttccaaatcttgaagtcatggttcctttttgctacaacaattccttcttcagttta

SEQ ID NO: 1030 - DNA, 282 bp, Homo sapiens
tgtcattctcaccttgtagacgagatgacccaagctcagagaagctgtctggctggaacgaggttcctgcagctcgaaaaccaagagtcgagataagcgtcaaacatagcctctcggcgggcgcagtggctcacacctgtaatcccagcactttgggaggctgaggcaggtggatcacctgagatgggtggctcgcttgagcccaggagtttgagaccagcctgggcaacataatgtgaccccatctgtacaaaaaattaaaaacacatgcacacacacaaa

SEQ ID NO: 1031 - DNA, 4423 bp, Homo sapiens
ggaaccaaattctgccaccagcacaacaattgcagtttactggagcatgaacaaggaagatgtcattgattcatttcaggtttactgcatggaggagccacaagatgatcaagaagtaaatggtaggattgctaacacaaatacaaatgcatatgcatattcatgcatcttcatgtgaagtatttaaatatacacctgtattatgactcttcccacaaagcagtttatagccatttacaaaacaacaacaaaaccccaacaaccatataatgaaataataactacagaagcaaaatttgggaatcaagatcagggaaaacaaaatggcataaatattataatagtcaacacaaatattgtaattgagattcacatttggctttgagctctcagaataacaggagcaatgaagtggttctcatttagagaaaggaggtaacataccagagtttcaaggaaaataaagtttttaacagtacgaaagcctgaaagacaagtgtcacgtgttccacttttagggaagaagccatagagaggacagtgtgctccacaatgacctgaatgcaaatgaagcatgggatgtcatgggtggcagtttctcaggtctgtctttgctaaaagccaccaacaagccacaagattcattcagtgttcacagttcccagggcgtgggcctaggtatggtgtagtcttcctgtgtcccaaattaatgtgtggatagaaatgaaagtgcttagtagggtgaatggatggtatgtcttacagctgagcctctgtaagtatctctcagctcagaaggacttctaataagccctggaagccaggcagtttgaggttgtgcttcctgatgaatcagagctgggagtgctgccattctgtgttgcttgttgaagacagacccacatactatggaaaacagatgagcatgtggcaggcttggcgtcctaactcaggtgcccaatttgtaatcaggaatgaatggtaatatattatactattactaatatttaagtcttttgaaatgtcatgtgataattaatttagaaaaaagtttaaaaaagcaattataggcatggtgtaaagttggctaaatctgtctgtaatgtcatgactcctgttttattgacctatttccatatgcctgtcacagcacaaccaagtaagtgttactatccctatttgcaagtgagaaaactaatgtgaggttacatagtttgctcaaggccttgcaacttgtacatgaccgggggcaggagtcaaacacacatctttcaggctccaaagtttattcttttgtttgtttgtctctgtgtgtgttttgttacaccatacttcatctccatctatttctagctctatttcatggctctctgagacccttcttatcaaaagaaaattgttgcttggcctgcttttttttttttttactgggtttcacccccaccccaaacacttccctatcctgtgtctcattgtttctgtgccctgaactgtgttaataacagttagctaatctgataatctagtctgtgataccatgtcatgtttagtagggtctctagtcacatatgttatgtacactgttaaagggagtgccagggtaataggatgtattagttcattctcacactgctataaagacatacctgagactgggtaatttatgaagaagaggtttaactggctcacagttccacaaggtgtacaggaagcatggcagaggaggccttaggagacagaatcatggcagaaggtgaaggggaagcaagcacatcttcccatggctggcagggaagagagagagagtaaagcaggaagtgctacacactttcaaacaaccagatctcttgagaactcatttatgagaacagcaagggagaagtccacccccatgattcaatcacctcctaccaggctcttcctccaacactgggaattacaattcaacatgagatctgggtggggacacagaaccaaaccatatcataggaccttgcctaaaagaatgattccagtgaaaattgcagacacagattctgggatatgggagaaatattcttcagtgtacaggtccttatgaggttctttaaactgaactttctgtccagaaagtacagctcattggaaaggagagaggcaattgagaagcctgctaagttgaagagctcccgattttcttttaaagaaacagtctgggttcttaagtggaaaagttttgaagatgtgacattcaagagtcataagggggggaaactgaaattaccataggcaaaatttacaaagaaaatcatatgttttaaaggagataaaatttcagtgagaataatcaaattggcccaaattggtaggtttgttcagaatggtattggataatgtttactattaaaatattcaaagtaagatattttttaaaatttttgaaggcaaatgtcttaattggacaaagttacttcttagagtagcttatgacctatcaaagttatttaagtatttctataaattgtggaaatccctagtggaaagaattctggaattcatgagaagaaaccaggatttgaaacctggaaggtcatactgaataccaaaatagtttactaatctgtaaagatgtttaaaaaccatgaagttgtcctttttttatgacatactcttctgaaatattggcactggttcttaagattttcttgagaatgtgttactgagatttaagctaacatatacattatgtaattttaatattcgctactgaaataagttactttaattgtggtatatgaagctcagaatcttactaatatgctattattttctgagaagtgttaacaagtattactatgtcatcctaagtatctcttttcagaatgctgttgctttcatatgtattctaaggagctggttttcacataatggtatctgtaaggttatcagtttgcattttccactgaaagaaaatcatagatgactttctccagtaactataacttttaattaactttggaagatgtcttcgattttaattgtgtcttatgctagagttggtagaagaatacagactgacagtgaaagaaagctactgcatttttgaagatctggaacctgaccgatgctatcaagtgtgggtgatggctgtgaacttcactggatgtagcctgcccagtgaaagggccatctttaggacaggtaaggagatggatgctaagggtgcattagaagacaacgctcagttcttcacagactcttgagatcagccagtaagtgtttattaagcacctattgtgtgttgagtgttgtgcaaagtgctggttatacaacgatgacttaagcctggggtcctgttctcaagaagctcatgctcaggtggggagatggaaaaacagaggatcatagaaaatgtgtggtaagggccatatccagatatacacaggttattatgagaacactccagaggggcacccaagttggcctggggcaggggcaggatcggaactgcttcctagaactgatgcctgcagaaaatgctttaaaggatcaataggaagtaatgcgttaaaggaggatattccacttgaaaaagacatgagcagaggcatcaaggcaagaaacagtatggagtgtgcaggacactgtaagaagtttggtattatttcttagacttaaacaaaggaaagacaagataagaaaggctaacatagagaggccgtgtttgcaaggtaagaagcttgggctgcgtgtgggtgctgggaacccccaaaaggttttaagcagtggtatttaactggaaatgcattctcacgatgaaatcttttcacagggtaagaagcctaaaccaaggctgcactgcctttaagataatggtaacctgcctcaggggaagaaatagtttactcctaccctttatcctttcctcttgccttttaaaacaagcctttattgagcacctactgaggacaagatcatggctaacttgtgtgtactgggacaggggaaagaatctttattttgatttgcttgtatatgtataaagaaagtctagtgggatttttaggaagctactattaggggctgtttggggatgggtgagaactgggcaatgtggaaggcagagaagggagagagacatcaccatctatatttgatcccttttgggtttttaacacagaatacactttctgatgaaaaattgaaaacagaatcatgccgaagccgtggaagatcatgtgcttctcaggtcccaggaaagcaagctggcattgctccacgactgtcctgactctctttctgcagcaccctccacccctgtgatccgcgctgaggactgtactgtgtgttggaacacagccactatccgatggcggcccaccaccccagaggccacggagacctacactctggagtactgcagacagcactctcctgagggaga

SEQ ID NO: 1032 - DNA, 10503 bp, Homo sapiens
actgcttctttagagaaaatgcctgctgcgttttcccttttcgaacattatgatgacagctcggcaagaagtgaccagatgttaaaacaagtggctggtaagcattttaatatattaattacctagatgaaatatggcagtttttgcttgtttgttttgtatgtaatgatatatacaaaagattttgagtgtaaagacatgtaactggaaaaagaaaagtattagttgtaaaatgttacagctagactctgaaattgagcatgggaggaacatcccatttctgtgcatttccatctgaagctttatgacttgcttggagattgaggaggtggaaggagccatggaaccaaagggtctcctctttttttttttctttaatttaaaaataggatttctctccctctcttctcatttgcctcataccagcagccaggtatagaagaaaaaagaagtcaaatgttttcctacgtgtcaaacagatttctctttatgagtggttttcccctcttcaattcagttcttttccccttttttcaaactaaacagatgagcttagagaactatcagctcagcaccatggtctgtagccaggagcctcccactcggctgtcagaagcatcctgccagctcttcacaatattttttaatgtgctattttaacaaacaggacaatgaaacttatttagatttttcaaagctgccatgtttcagtgaagttaccaagtttttcttactgtacaacatgctcaggtgtcctccttaaaagatgctgtagtcttccaaaatcacctcaaagattacagctattcaggaggctgaggcgggaggatcacttgagcctaagggttcgaatccagcctgggcaacatagtaagacccccatgtctaaaaacaacaacaacaacaacaaaaaaccccaaaaaacaaaaacaaaaaagatggctgttgtgtttaaattgatgattaacattcattcctgtacaaagagttttaatttagtaactactaaaaaggctactgtatgtctaaaaagacaaaaacaacacgacaccacacaacacacaaaaacccaaaaccccaccagccctttataaaattaaaaactcaatcattgatcttaatggattttctctagaaatgtctcaaagtgttttcttgtaatgtctttaagagggattagactaggacagtgattgcaaactaagaaagtttgattaacagagctggtcttttgcttttaagggattcattatatgccactgttcatttaggaggatatgcttttcaatacttaatgggcaatgagaggacgtttaatatattttagaggtcacagagttaaaatgtcacaaagtgttaacaattaactcagcaagtgcacatggcggtccctgtggctggaagccttttatggagagactgatctcagagccataaatgttactttgtgcgtctgtttcacaaaattggagcccagggtgttgacttgctgctaagtagtttttgtgcatttggtgacacctctcagaagtcctcacctgtgacctgaaaagttgatctgatgaccccctacctaaactaagcagatacaatgagaaaaggatgtgagttttccaatgagaagtagcagcccatacgatttattccatgcttatacgatggctggcattgtggaaaccgttaagcatatcaaatcatctaatctcaccataacccaaggaggtaggttttgttattcccatttgacaggtgaggaaaggtgaggaaagagaggaacagaaaaatgttctattttcaagaaaacacagccggttggggtgtgtttggcaggggagtttggcttcagagtctgccccacagcgaaaaggcagagtgctgctgagaaagatgagagaaacagatcatgataaacaaacatgaatctaggcttccttgatgctggcacctggggattttttttttaattgtggtaaaatacacataacaaaatttaccatcttgcccatttttaattgtacagtttagtggcattaaggacattcacattgtggtacaaccatcactgccatcctctccagaactcttcatcttgcaaaacagaagctctatatccattaaacactaactctccatattctccccttctcctggctgtggcagccaccattttactttctgtttctgtgaatttgattactctaagtacttcatctaagtggaatcatatggtatttctctttttgtgactggtttgtttaacttagagtaatatcctcaaagcttaccatgttgtaacgtgaaacttttcctcctcttatctattcatccattggtggatacttgggttgcttccactttttggctattgtgaataatgctgctcccctgaggacgttccaaaggccaggttgagtggaaatctgtatctggtcacagattccaaagtccagtttggttaatgcttaactcccccagtgtggtggctctttttgggcacatttcatcaggcagaggggtgattcttctacccaattccttagcctcttataatgaagccctaaactttcattttggtattttttggtatcatacctttttttttttccccacacagagtctcactctgtcgcccaggctgaagtgcagtggcaccatctcggctcactgcaacctccgcctcccgggttcaagccattcttatgcctcagcctccccagtagctgggattacaggcgtgcatcaccatgcccagctaattgttgtatttttagtagacatggggttttgctgtgttggccaggttggtctcctactcctgaactcaagtgatctgccctccttggcctcccaaagtgctgggattacaggcatgagccactgcgcccggccagcatcatacttattcaagtttattactgtaaaagtgtaaacagagttgctaaactccgggtctctgatgttgttctaccacataagaattgtaaatccagccattattattagattatatctatggaatattcttattcccttttcattttagaattctttgaaaagtaaaagtatttcctgtttctgaaaaaaggtgttttacctttaatgcttttgggggaaggagcacattaaaacaaaatttctaacctacatactttgcttcttccttgaaattaagtgattttcttggatcaattaatcagtttttaagtttgttaatttacccgagaaagagagagaaatgtgaaagatgttttcatttttaaaaagcagatacagctccatgtataattcataggataaaagggggagcattttcactgttcatgcctcaagtaattctcaaatactgcttcaaagatgatcgacaatccttgaaacattctgcttggtcctttcatagacctgggtaacatgaaaatttactgaactacatttttctggacagacttatttagaatgtgacatccatttcctgctgggaagacaagcaataaattccaagacagtatcagggtctctgacccgtgatcagttcctggggaggtgctctcaccagcggcctctgccttagcatgcagttcgctcctcaggtcttacctctgtggcctctgtggctttccagatgatgggtccctccttcagccctcatcttcaggagcttcctgccttgcccctctgtttcctgtgctcctgccaaggcccctttgctttctgaatgttagcactggttatctgtcagccactttgctaagcactcgatagatattatttgcttcctataatgacactgggaggtaatactattattattgttttctcattttaaagatggggaaactgaggctgagataacagaggggatggatctggtgtttaaccttgggccagccactctgcattgaagtccatgaacttgacccttctcctcttctgcttctcgtttttcacaactgtgtattttttcagctctttatcgctgttgcatcttctcagtttgtctctttttgctacattctttagacccatttgtgtttttctcatttgtaccttcttgctgaactgatctttatttttcttttcctttggtgtccacttttaataaagtaatctcataaaatttggcccatattattaatatttcagtaaacttatctctcaggaaattgttgactggaaaaaaaacccataaaaaataaatgtaaaaacatgctattgggtcaggtgcagtggctcatgcctgtaatcccagcactttgggaggccgaggcgagcggatcacctgaggtcaaggagtttgagaccagcctggccaacacggtgaaaccccatctctactaaaaatacaaaaaaatgagctgggcgtggtagtgggcgcctgtaatcccagctactagggaggctcaggcagcagaattgattgaacccaggaggtggaggttgcagtgagctgagattgcaccactgcactccagcctgggtgacagagcaagactccatctcaaaaaaaaaaaaaaaaagcatgctattttttcaactatgggaataaccttttcctctaatttgtaaaatatgttcaaagattttatgtcataagttttgggggagaattgcatagaagtttgatttatggcattgcatataccattaatgtttgtacgcataatcatgaactttacaagtttctaggaaaacatccaaggattttgttgtcattaaaattcagaacaacggagttatactaggtgtctaaaatgtatgctgaatcagtaggctactttttctgtagtttttatatattttgtttaatttttaaaaagttagtaattaaaaaaattgatagggctagccatgttggaaagaaaaaatgggatagtcgtttcagaaagtgtattttgatattttatttttgcaagtatttttctggcttgaagatacaccaactatatcttaaaagggtttcatttgcctctatcgtgaatatagaatctatattgatacagaatgatacaaccttggctatctagcaaagcatgtgttttgttttgaaggataagcaagtcagttgttgcctcctctaacctacatgagtttattgctccaactataggactgtagaagagtattctcaagtgatcccattttggaatacatttttgtttatttctgtgtgtattatatatgtgcacatgtacaaatgcatagaaaatattgtggagggatacacattcaacagtgattgcatctaaagaatacagctgggcgcggtggctcacgcctgtaatcccagcactttgggaggctgaggcgggtggaatccttgaggccaggagttcaagaacagcctgaccaatatggtgaacccccacctctactaaaaatacaaaaattagccaggtgtggtggtgcaggcctgtaatcccagctactcaggaggctgaggcaggagaattgcttgaacccgggaggcggaggttgcagtcagccaagattgcgccactgcactccagcctgggtgataaagcaagactccatctcaacagattaaaaaaaaaaattggccggtgtggtggctcatgcctgtgatcccaacactttgggaggccgaggtgggtggatcacctgaggtcagaagttcgagaccatcctggccaaggtgatgaaaccctatctctactaaaaatacaaaaattagccaggtgtggtggcaggcgcctataatcccagcaacttgggaggctgaggcagaagaatcgcttgaatctgggaggcaaaggttgcagtgagccgagatcgtgccactgcactccagcctgggtgacagagtgagactcagtctcaaaaataaataaataaaattaaattaaagttaaaattaaaataaaataaaaaataaaaaaatataattggggttgggggtttgggggaacaagagagcccttctacttttatactatgtatttctgtattctttgaatatttttcaacaagcataagtaacttgtgcccaaaaaattaataaaaacagcattagttacaataaaacttgtttatattccagttccacagcctcctagattagaacctcaggaaccaaattctgccaccagcacaacaattgcagtttactggagcatgaacaaggaagatgtcattgattcatttcaggtttactgcatggaggagccacaagatgatcaagaagtaaatggtaggattgctaacacaaatacaaatgcatatgcatattcatgcatcttcatgtgaagtatttaaatatacacctgtattatgactcttcccacaaagcatttatagccatttacaaaacaacaacaaaaccccaacaaccatataatgaaataataactacagaagcaaaatttgggaatcaagatcagggaaaacaaaatggcataaatattataatagtcaacacaaatattgtaattgagattcacatttggctttgagctctcagaataacaggagcaatgaagtggttctcatttagagaaaggaggtaacataccagagtttcaaggaaaataaagtttttaacagtacgaaagcctgaaagacaagtgtcacgtgttccacttttagggaagaagccatagagaggacagtgtgctccacaatgacctgaatgcaaatgaagcatgggatgtcatgggtggcagtttctcaggtctgtctttgctaaaagccaccaacaagccacaagattcattcagtgttcacagttcccagggcgtgggcctaggtatggtgtagtcttcctgtgtcccaaattaatgtgtggatagaaatgaaagtgcttagtagggtgaatggatggtatgtcttacagctgagcctctgtaagtatctctcagctcagaaggacttctaataagccctggaagccaggcagtttgaggttgtgcttcctgatgaatcagagctgggagtgctgccattctgtgttgcttgttgaagacagacccacatactatggaaaacagatgagcatgtggcaggcttggcgtcctaactcaggtgcccaatttgtaatcaggaatgaatggtaatatattatactattactaatatttaagtcttttgaaatgtcatgtgataattaatttagaaaaaagtttaaaaaagcaattataggcatggtgtaaagttggctaaatctgtctgtaatgtcatgactcctgttttattgacctatttccatatgcctgtcacagcacaaccaagtaagtgttactatccctatttgcaagtgagaaaactaatgtgaggttacatagtttgctcaaggccttgcaacttgtacatgaccgggggcaggagtcaaacacacatctttcaggctccaaagtttattcttttgtttgtttgtctctgtgtgtgttttgttacaccatacttcatctccatctatttctagctctatttcatggctctctgagacccttcttatcaaatagttgttgcttggcctgctttttttttttttttactgggtttcacccccaccccaaacacttccctatcctgtgtctcattgtttctgtgccctgaactgtgttaataacagttagctaatctgataatctagtctgtgataccatgtcatgtttagtagggtctctagtcacatatgttatgtacactgttaaagggagtgccagggtaataggatgtattagttcattctcacactgctataaagacatacctgagactgggtaatttatgaagaagaggtttaactggctcacagttccacaaggtgtacaggaagcatggcagaggaggccttaggagacagaatcatggcagaaggtgaaggggaagcaagcacatcttcccatggctggcagggaagagagagagagtaaagcaggaagtgctacacactttcaaacaaccagatctcttgagaactcatttatgagaacagcaagggagaagtccacccccatgattcaatcacctcccaccaggctcttcctccaacactgggaattacaattcaacatgagatctgggtggggacacagaaccaaaccatatcataggaccttgcctaaaagaatgattccagtgaaaattgcagacacagattctgggatatgggagaaatattcttcagtgtacaggtccttatgaggttctttaaactgaactttctgtccagaaagtacagctcattggaaaggagagaggcaattgagaagcctgctaagttgaagagctcccgattttcttttaaagaaacagtctgggttcttaagtggaaaagttttgaagatgtgacattcaagagtcataagggggggaaactgaaattaccataggcaaaatttacaaagaaaatcatatgttttaaaggagataaaatttcagtgagaataatcaaattggcccaaattggtaggtttgttcagaatggtattggataatgtttactattaaaatattcaaagtaagatattttttaaaatttttgaaggcaaatgtcttaattggacaaagttacttcttagagtagcttatgacctatcaaagttatttaagtatttctataaattgtggaaatccctagtggaaagaattctggaattcatgagaagaaaccaggatttgaaacctggaaggtcatactgaataccaaaatagtttactaatctgtaaagatgtttaaaaaccatgaagttgtcctttttttatgacatactcttctgaaatattggcactggttcttaagattttcttgagaatgtgttactgagatttaagctaacatatacattatgtaattttaatattcgctactgaaataagttactttaattgtggtatatgaagctcagaatcttactaatatgctattattttctgagaagtgttaacaagtattactatgtcatcctaagtatctcttttcagaatgctgttgctttcacatgtattctaaggagctggttttcacataatggtatctgtaaggttatcagtttgcattttccactgaaagaaaatcatagatgactttctccagtaactataacttttaattaactttggaagatgtcttcgattttaattgtgtcttatgctagagttggtagaagaatacagactgacagtgaaagaaagctactgcatttttgaagatctggaacctgaccgatgctatcaagtgtgggtgatggctgtgaacttcactggatgtagcctgcccagtgaaagggccatctttaggacaggtaaggagatggatgctaagggtgcattagaagacaacgctcagttcttcacagactcttgagatcagccagtaagtgtttattaagcacctattgtgtgttgagtgttgtgcaaagtgctggttatacaacgatgacttaagcctggggtcctgttctcaagaagctcatgctcaggtggggagatggaaaaacagaggatcatagaaaatgtgtggtaagggccatatccagatatacacaggttattatgagaacactccagaggggcacccaagttggcctggggcaggggcaggatcggaactgcttcctagaactgatgcctgcagaaaatgctttaaaggatcaataggaagtaatgcgttaaaggaggatattccacttgaaaaagacatgagcagaggcatcaaggcaagaaacagtatggagtgtgcaggacactgtaagaagtttggtattatttcttagacttaaacaaaggaaagacaagataagaaaggctaacatagagaggccgtgtttgcaaggtaagaagcttgggctgcgtgtgggtgctgggaacccccaaaaggttttaagcagtggtatttaactggaaatgcattctcacgatgaaatcttttcacagggtaagaagcctaaaccaaggctgcactgcctttaagataatggtaacctgcctcaggggaagaaatagtttactcctaccctttatcctttcctcttgccttttaaaacaagcctttattgagcacctactgaggacaagatcatggctaacttgtgtgtactgggacaggggaaagaatctttattttgatttgcttgtatatgtataaagaaagtctagtgggatttataggaagctactattaggggctgtttggggatgggtgagaactgggcaatgtggaaggcagagaagggagagagacatcaccatctatatttgatcccttttgggtttttaacacagaatacactttctgatgaaaaattgaaaacagaatcatgccgaagccgtggaagatcacgtgcttctcaggtcccaggaaagcaagctggcattgctccacgactgtcctgactctctttctgcagcaccctccacccctgtgatccgcgctgaggactgtactgtgtgttggaacacagccactatccgatggcggcccaccaccccagaggccacggagacctacactctggagtactgcagacagcactctcctgagggaga

SEQ ID NO: 1033 - DNA, 144 bp, Homo sapiens
aaaaaaattggccggtgtggtggctcatgcctgtgatcccaacactttgggaggccgaggtgggtggatcacctgaggtcagaagttcgagaccatcctggccaaggtgatgaaaccctatctctactaaaaatacaaaaatta

SEQ ID NO: 1034 - DNA, 2396 bp, Homo sapiens
cctaactcaggaaactaatagtgagcttgtgtataatgtaaatcggaatgtctccatgatagattggtaacattaaggagctaattacatgtatattatcatggagacatacctgcctctccaaaagcatgaaatatgtaaagagattcttctaggaaaaaagaaatgtgacgctctctcaccaagatgctgaagctgacattcatcaataagcagctgtgcatccactaggcatttggtaaatgttaacttatctaccgaggtggtgttttcttagcctcccacctccttgctgtggagcagcttcatgtaccatgatgcatattcagatcattcttaatactcatattttgatagagaggtttttaggttttcttttaaaccaagtttattgagataaactactttggtaggatatggaacttaggaataatggtatgaaactagacagcttttttttttttattacactttaagttctgggatatgtgttcagaacatgcaggtttgttacataggtatacacgtgccatggtggtttgctgcacccatcaacctgtcatctgtattcggtgtttctcctaattctatccctcccctacccccctgcccccaaaaaggccccagtgtgtgatggtcccctccctgtgtccatgtgttctcattgttcaactcccacttatgagtgagaacatgaggtgtttggttttttcttcctgtgttagtttgctgagaatgatggcttccagcttcatccatgtccctgcaaaggacatgaactcagtccttttttatggctgcatagtatttcgtggtatataagtgccacattttctttatccagtctatcatttgggttggttccaaatctttgctattgtgaatagtgccgcaataaacatacgtgtgcatgtgtctttatagtagaatgacttataatcctttgggtatataccccataataggattgctgggtcaaatggtatttctggttctagatccttgaggaatcgccacactgtcttccacaatggttgaactaatttacactcccaccaacagtgtaaaagcattcctatttctccacatcctctccagcatctgttgtttcctgactttttaatgactgccattctaactggtgtgagatggtatctcattgtggttttgatttgcatttctctaatgaccagtgatgatgagctttttttcatatgtttgttggcagcataaatgtcttcttttgagaagtatctgttcatatcctttgcccactttttgatggggtttttttttcttgtaaatttgtttaagttccttgtagattctggatataagccctttgtcagatggatagattgcaaaaattttctcccattctgtaggttgcctgttcactctgatgatagtttcttttgctgtgcagatgctctttagtttaattagatcccactggtggattttggcttttgttgccattgcttttggtgttttagtcatgaagtctttgcccatgcctatgtcctgaatggtattgcctaggttttcttctagcgtttttatggttttaggtcttacgtttaagtctttaatccatcttgagttaatttttgtataaggtgtaaggaaggggtccagtttcaattgtctgcttatggctagccagtttttccaacaccatttattcaatagggaatcctttccccgttgcttgttcttgtcaggtttgtcaaagttcagctggttgtagatgtgtggcattatttctgaggcctctgttctgttttattggtctatatatctgttttggtaccagtaccatgctgttttggttactgtagccttgtagtatagtttgaagtcaggtagcatgatgcctccagctttgttctttttgcttaggattgtcttggctatgcaggctcttttttggttccatatgaaatttgaagtagttttttccaattctgtgaagaaagtcagtggtagcttggtggggatagcattgaatctgtaaattcctttgggctgtatggccattttcacaatattggttctttctatccatgagcatggaatgtttttccatttgtttgtgttctttcttatttctttgagcagtggtttgtagttctccttgaagaggtccttcatatcccttgtaagttgtattcctaggtatttaattctctttgtagcaattgggaatgggcattcactcatgatttggctctgtgtttgtctattatggttgtacaggaatgcttgtgatttttgcacattgattttgtatcctgagaatttgctgaagttgcttatcagcttaaggagattttaggctgagatgatggggttttctaaatatacaatcatgtcatctgcaaacacagacaatt

SEQ ID NO: 1035 - DNA, 1684 bp, Homo sapiens
cctaactcaggaaactaatagtgagcttgtgtataatgtaaattggaatgtctccatgatagattggtaacattaaggagctaattacatgtatattatcatggagacatacctgcctctccaaaagcatgaaatatgtaaagagattcttctaggaaaaaagaaatgtgacgcactctcaccaagatgctgaagctgacattcatcaataagcagctgtgcatccactaggcatttggtaaatgttaacttatctaccgaggtggtgttttcttagcctcccacctccttgctgtggagcagcttcatgtaccatgatgcatattcagatcattcttaatactcatattttgatagagaggtttttaggttttcttttaaaccaagtttattgagataaactactttggtaggatatggaacttaggaataatggtatgaaactagacagcttttttttttttattacactttaagttctgggatatgtgttcagaacatgcaggtttgttacataggtatacacgtgccatggtggtttgctgcacccatcaacctgtcatctgtattcggtgtttctcctaattctatccctcccctacccccctgcccccaaaaaggccccagtgtgtgatggtcccctccctgtgtccatgtgttctcattgttcaactcccacttatgagtgagaacatgaggtgtttggttttttcttcctgtgttagtttgctgagaatgatggcttccagcttcatccatgtccctgcaaaggacatgaactcagtccttttttatggctgcatagtatttcgtggtatataagtgccacattttctttatccagtctatcatttgggttggttccaaatctttgctattgtgaatagtgccgcaataaacatacgtgtgcatgtgtctttatagtagaatgacttataatcctttgggtatataccccataataggattgctgggtcaaatggtatttctggttctagatccttgaggaatcgccacactgtcttccacaatggttgaactaatttacactcccaccaacagtgtaaaagcattcctatttctccacatcctctccagcatctgttgtttcctgactttttaatgactgccattctaactggtgtgagatggtatctcattgtggttttgatttgcatttctctaatgaccagtgatgatgagctttttttcatatgtttgttggcagcataaatgtcttcttttgagaagtatctgttcatatcctttgcccactttttgatggggtttttttttcttgtaaatttgtttaagttccttgtagattctggatataagccctttgtcagatggatagattgcaaaaattttctcccattctgtaggttgcctgttcactctgatgatagtttcttttgctgtgcagatgctctttagtttaattagatcccactggtggattttggcttttgttgccattgcttttggtgttttagtcatgaagtatttgcccatgcctatgtcctgaatggtattgcctaggttttcttctagcgtttttatggttttaggtcttacgtttaagtctttaatccatcttgagttaatttttgtataaggtataaggaaggggtccagtttcaattgtctgcttatggctagccagtttttccaacaccattta

SEQ ID NO: 1036 - DNA, 246 bp, Homo sapiens
acacatctaagtacctttaggggcttctgataggttatgccctatgtaaatgaaggattctgccctaggccaatcagaggcaggattctgtccaggaccagtcagaatcaagattctgcccaggaccaatcagaggcatctcacctatggcatatatgcagatgaaggtcccagaatggaccaaaaccagacattcccattcctgacataggggaggggaggttcggagagggatgggcctttggc

SEQ ID NO: 1037 - DNA, 103 bp, Homo sapiens
ggctgaggcaagataatcgcttgaacccaggaggtagaggttgcagtgacccaaaattgcaccactgtactccagcctgggcaacagagcaagactctgtctc

SEQ ID NO: 1038 - DNA, 385 bp, Homo sapiens
gatcactgtactttgggtaacctcattttttccttttcattccttctagctgcttgctagaaccttcttgactttttagttgttaattgttcaggtggattttaagaagaatcaggtgtatttcttaggttttgaggcagattttgaaattcagtagataatccatctttttatcttaaatcacaggaactacagtactaaggaaggtggaaaaatgtcaaatactggattttttaatctcatgaatttaccatctgagtaaagttagtctgttagtaactgagctgagctgagttagtctccttttttttttttggtttgtttgtttgtttgtttgtttgttttgagacggaatcttgctctgtcactgggctggagtacagtg

SEQ ID NO: 1039 - DNA, 261 bp, Homo sapiens
cttccttctactttgtcttctgtaagagaaaaatactgataagtgacatttattataggttatgtaaaataatatatatgtgaaattccttaagatcttaagactgagctaatttttttttattaattatgctactgttgcttcagggaactaagcagtaagctgaaaccaattctgtgatgtttgtcatttatattatctggagagttgttacctacattgcagtttatcctgatttcaatttgacaatgtctacatgtt

SEQ ID NO: 1040 - DNA, 261 bp, Homo sapiens; identical to SEQ ID NO: 1039

SEQ ID NO: 1041 - DNA, 647 bp, Homo sapiens
cctatctgtctgtaccctaatccgttaatccatttttttctgatgaatttcaaattaagttgtggacatctgtgtatttcacccctaaatacttgagcatatccctcatttaacttgatttctctcttactttctacaattttatgcaaatgagctgtttcccataggttctgtcttgatcttaatcctttaagggtaagggctaacttgtggttgtgttaatggtcttcatcgctgctgcctattttttttttttaatttccttaaaacaaaaggtactctcaaaaggcatattgcacatgattagcaagattcagaaggaagtggttaaagtttcttacatgccttatacctatgcttttagttcttgttttgtataaggaatgttgcatgaggatattggaaaaaaatttaaaattaagagttgaaggcggaacctgatctataaggatccattatgttgaagccaaagaagcaggtctagctattctaagtaagtaggctggagaggtgtttcttaactctatctgggttttgttttccatttgaagaaaaattattttaagcaattaccatttttgattactgtaatgactcctgtgtccaaaaattaattacgtttctaattattaaaatagaaaaaaaaa

SEQ ID NO: 1042 - DNA, 7794 bp, Homo sapiens
atttgaatcctgtcatttactagcgttttgaccttgaacaattatgctcagagtctcagttttttcttgtaaagtgatgatgatactacttaactcacagggttgtagtgaagatcaaatgagatcatgtctgtagaacaccctgcccggcactcaataagtattaataggaacccatatacctcttttgaaaattttaattgtcagacaaataaaaaaaaaagccagtgctttgtaaatattcgtgaatatttagtgttcattctgtttttttgtcatgatggagagagagttgggtttctgtgaattactgttacagctttacattaatatttttaaatcactttttggtatgaagaatttcaaatgaaaggtgatagagtagtatagtgaatcctcatgtactcatcagtcggctttgataatcatcaactcatgattttctctaaactgttcatttcaacatcttatcttgccatctactcctacctccaatttttttttaacttttattttagatttgggaggtacatgtagaggtttgttgcaaaggtgcattgcatgatgctgagatttgaggtacaattgaacccatcacccagatagcatagtacccagtaggcagttattcagcccttgcccctgccctttctcaccgctcttgtattccccagtgtttatttgttcccatctttatgtccatgtgtccccagtggttagctcccacttataagtgagaatatacagtatttggttttctgtttctgcattagttcgcttaggatagtggcctcctgctgcatccatgttactgcaaatatttcttcttttttatgggtgtgtagtagtccatagtatatatgtatcacatttttgttatccagttcactgttgatgggcacttggattgattccatggctttgctattgtgatcattgtggtagtgaacatacaggtgcatgtatctttttggcagaatgctttttttttttgggtggtctgtattcagtaatggattgctgggttgaatggttgttcagtttagttctttcagaaatctccaaactgctgtccacagtggctggacattcccactaacagtgtaaaagcattccttttctttgcagtcctgccaacatctgttcttttttgactttttaataaaaactattttgcctatcccatctccagttttgaaatgaatctaagccgtatcattccatctggaaatatttcagtatatatctttaagagacaagaaagactatatattaactttttaagatttaaataaaaaatatttaatgagacaatacatttacatgtttcaaaatttaggaggtatgaaaggatgtaaatgatgtataggttcctcctaactttgtcccctaattctcagttctgtttactttttttttttttttttttttgagatggagtctcactctgtcatccaggctagagtgcaatggcatggtttcggctcactgcaacttctgcctcgcgggttcaagctattctcctgactcagcctccgaagtagctgagattacaggcgcgtgccgccatgcccagctaatttttttagtattttagtaaagacggggtttcaccgtgttgcccaggctggtctcgaactcctgagctcaggcaatgcaccctcctccgcctcctaaagtgctaggattacaggtgtgagccaccgcacccggcccctcagttctgttttctggaaacagcagttttttaccaatttctcataaatcttttcagaaatggtttgcataatgtaagtgtttgtgtatgtatgtgtgtgtgttgtgtgtgtgtattcatctacatgtttatatacggctcccatccttttggacaaaaatgaaatcagattgtacctgttcatttaatactatacctaccctgtatcattaactaacagttcctctttacctcattccatacattttgctgtatgtcagacatttaacttttaggattactaaatgagacctggaactatttttttttaaataaataattgctacatgactgagagtatagctctgaactcaaaatatatccttgctaagatgatatatctgttattttactgctccttagtaaaattactgcaaaacttagtggcttgaaacaaccaccatttacttgcacatgattcagtgggtgtgcatattaagctgggctcacctgtgtggttcttctgctagtcttgtgtgggctcactgctttggttgcagccagttggtggctgggtcagctttgttgtccagaatgacctcaccctcaagtctggtggttagtgctgttggttgagcctctgcctccatgtgctcttttgtccagcttactttctatgggcatctcagcagcaagaatggaagctgcaaggccacgttatgttggtcaaaggaagggccagcgcagattcacaaggtgggaagataacacccacctgttgagaggaggcgtgaaaaagaattaatggtcatttttaatgcactgcaatgactttattgaataggtcctacacacacaaaaaggaagtctccgtcctttatgttgactggtgagaatgaaatgaaatagtacatgtgatgcctggcagttcatctttatgttaggcattacttacaatcgtaaatcgtatgcatgtgagttgtaaaaaatttattgccttgcttcctttattttaaaaggatttttggtaaaggtatctttgaaattacatgaaacagacttaaatatagaagaagatactttgttcaggtgtttaattttggaaagaatactttaaatttagacataaaagttctaaaacactttggcatgtgagttttgagagagtctaaagcaaatactcaacatttttttatttttcaaaggaaactggacaaaaataattgttcagaggaaaagagtaactagcttccattagaatttatagttaaagtatatagtaggaaataaccaagaaagcatacctgtatagctaaaaatctcaggtgaagatttgattttctctctctcttttttttttttcctgttggagctactctttcctatcagtcgggatggagatacctgctttatgcacacattgtatatctgtctatatgtctcatgtttttgaggcattccttgtgcacagaagcactgaactatatcattgtaacaatgccatggtttacagtatatttcatatgaatacctgaaactgttttcttgagttgccttcacatgctatataaaatttattttattatgtataatatgtgaaatattgatctgcatacctttaaaacttgtaaaagccaatgacttttttctacagtgttaggtagatttgtaaactgtgtttttcagagtctgtattttactgactacaaagttttcagtcactgttttgtagagggccttctgtttgggctttttctttatgttattttttctttttttttttttttttccctcctcttgagcagagagcaactgccaaactttctggaaattttgcatgtttttgttgttggagtttctgtagttgtttatgaaagtcttagggataagggggaagaatcatatatgtcaaatcttgtcattaagtttctgcacagttttaaaaaatggtgtgagttagtacatgcgctagtgattaagtgagtttggaactcgtgtgtaatgtttcaaagcaaattaagaggcaaaaaaaaagattcaagttgaatgtttaaagaattttttttaaatctgagttaggtttttaaatgtttattctgaatataaaatgaatgcatgcttagttatggaaaagttgaaataagaaaggaataaagataaatttactcataattgtaaagagaagctaattctctccctgtttttaaaacattcccttttattccctctagcttcttaattctgtatgtgtatttatgtgactaaggtcaaactgtaaatgcatttttcttttccttctctttttaaagagttaaatgatttttaacttgtaattagaatttattacttgtaggagtcctcaagcttttatatcatgtttttggaagcaaccagctagtttaacgcacttctgaaaatgaaaggaaaacttacatgttataggagagtttttttcccctgaagagttttaaactattattaaaaaaaatccctaatcacatttcatcacctagaatagtccttgatgacgacgtgtttccagtgtcaatatggtttggttcagtttcccatgaccagctcaagtccagtatctgactgaggcaaagggcttagggcttactgctttgggcacacctcatgattttttatctttgtctcaactgtattaggtttgaaaactgtacttctttgtacttttttttcattttccatttttttttatgaagagtaacatccaataaaactcttaagcacagagtcctgtttgaggatgaagatgtgaatattgcaacaaccacagtgcttgtctgagaagtgcatcacttggtgataatcctgagtgcttgttcttattttgagaaatataagtccagattccactataccaaagacagattggggtgggtatcagtgtaagacctgagagaaatgtaggctgtgaaaaatggaggcatgcctataatttactttttactaattcatattgaactcatgatcaaattggtgagggttttcacatttttcttttatttttaagtcagttgataattttgaggtttttaaatatttggtaggttcaaaaccaggattgccatttttcactgttgtaaaacctcttgagaaactttaacccggaggtatctatgattgggcctctgctgaaactatatgtaaaatatgagttcttttctcagggaagagcctagagtttttctagtttctcatagggatcagtgacctaaaagggttttttaattgctactgtaattaagaaaacccacaaaattacttttttctaaaatatgctttagaaagaaaatatagaaagtgtaaagtagcaaaacctatgaattacggtaagatttaagtagaaatttgcacaaactttcaaagcttaagtcagctataaactcatcacaccttttctaaaaggtcctttcctttgatttgtaataggaatttatattagttatagaaaatttggaaaataaaaagaacaaaaattacatataaactcatcagtaaaaattaactaggcactttaggatatttctttcaaacgtagatgaatgtgtttttacataattttaaaggtttttggctttgaattcacatctcattttcttagagcaaaagattagtaatgagtgaagaaacaggcacctgtgataactgacaagtcttcaaacacatgtgtatggttgttgtagagagaacagtagaacagattcttctgtccaggcttactatatatatatatccatggcactgtttttctcatgttgaaaagttaaattgaagaaatctagtagaatgttagctgcatctctctttagataattttgtttcattgacttgaaaaattatgtttttatatgcgggttaatcttggtatctatgtctaatagtaaagttttctgatggactcataaaatataaagaacatagattatttcatcagcatcttctgatgacataaattccttggtataatagagttataaaaaaggaatataccaccattctgcctgaattttgtggtacatttcagttacttatatcaattgaaattactgaatattttgccatgaccatttagaaaaaaagtgtaatgctattgatttaattcaagtacatttaaattttccatgaggagtgttccttttcccaccaaattgcataaagcataacagtatagatccctttttcaagaatttttaaataaaatgtaacttttatcaatttgtttagattgtttaaaaggatactttgaaaaaaatcattatttcttgctttagtaactggaggacatctctttatctatatagaatccatgcccaaacttaatattcctctattttcttgattttagaggtgaaaagccaggcatccttcaagctagtggatctttgacaaagatgcattgcaaaacaatcaacaaacaatcagaaaggcatgctatgtgtgagtgatgatccctgcagcatatgccataggcttgttgtagaggagctgctcagtaaatggtggattcaattgaaacaagtcttttttggatgcttaatgggaagttgtagggtgggtatgatggactaaaaattatttctaaagaaggttatatattgtatatattccagaatcttccgtttttatcgtttcttaaattaaaaaataaaaatttaactctgtcccaggttaactcagatgttaacacttatatagaaatttttttcctctttccccgttaggcatctcacagtattttctgcttgtctgtttaggatgttaggtagaggaaaagagagtgatagaagattttttttcttaaaaaaaaaaaaaaaaaaaaaaaaaaactgggccaggcatggtggctcacacctgtaatcccagcactctgggaggccgaagcgggtagatcacaaggtcagggttcgagaccagcctgaccaacatggtgaaaccccgtctctactaaaaatacaaaaattagccgggtgcggtggcgcgtgcctataatctcagctactcaggaggctgaggcaggagaatcgcttgaacctgggaggtggaggttgcagtgagccgagatcacgccacggcactccaggctgggtgaaagagtgagactccatctccaaaaaaaaaaaaaaaaaaaaaagttcaatgttagtatttgctgtctattttaacttcttactttaaagtaaaattagcaaagtcttattgtttcaacctgatttaaattttatctcccttttttattatttaaaggttggagtctttatcactggcctcaaaggatgtagactttttttttttaatagagatttttatttttgtcagtcacttttaagaggattaaaaatgttgatccctttcatatttcctcgtccctttaaaaatattctattatgacaaatttcaaacatatggaagagtgaatcttgatcacctatctgtctgtaccctaatccgttaatccatttttttctgatgaatttcaaattaagttgtggacatctgtgtatttcacccctaaatacttgagcatatccctcatttaacttgatttctctcttactttctacaattttatgcaaatgagctgtttcccataggttctgtcttgatcttaatcctttaagggtaagggctaacttgtggttgtgttaatggtcttcatcgctgctgcctattttttttttttaatttccttaaaacaaaaggtactctcaaaaggcatattgcacatgattagcaagattcagaaggaagtggttaaagtttcttacatgccttatacctatgcttttagttcttgttttgtataaggaatgttgcatgaggatattggaaaaaaatttaaaattaagagttgaaggcggaacctgatctataaggatccattatgttgaagccaaagaagcaggtctagctattctaagtaagtaggctggagaggtgtttcttaactctatctgggttttgttttccatttgaagaaaaattattttaagcaattaccatttttgattactgtaatgactcctgtgtccaaaaattaattacgtttctaattattaaaatagaaaaaaaaa

SEQ ID NO: 1043 - DNA, 638 bp, Homo sapiens
ccacaggtaacagttgagtggtgctccaccctcatcccagcctccttactgccattaccaggagaggatgactcaacacattcatgttgtgagatacttaaccaaatttatgccagatgggaagacttaaaggatcagcccttggacaatctggtcaaaatatggttttcagatgggagcagttttgttcagaatgaaactatatatgcagggtacacagaggctaaagctctatccttggggacctcaggacaactagcaaaactcatcttttaaccacaggcctaacactaggggaagggaaaagcataaccatttatacagattccaaatatgcctttttggtgcttcatgcccaagccactatctggaaggaaagggagtacccagcaacttgggatactcctactaagtaggggccccaaatcttagagctactagaggccattcacttgacccaggaggtggcagtagagagggttctggaaatggcaggcactcattgggtaatggtcaagctatcataaaactgtccctctgaaatgagaagtggccatgactgggaccaagacagagaggagttctgcaacagatagaaaacatctggagccagcaaatcacaattccctgatcaggtt

SEQ ID NO: 1044 - DNA, 444 bp, Homo sapiens
cttgaactcctgacctcaaatgatccacctgccttggcctcccaaagtgctgggcgtgagccaccgtgcccagcccctgatctggtcttaagcatggggcaaaagtagggggggaaatggtggtgtttgactggtatatgaccttcctctggaggtgatcaaccagtaagggaaaatcgctccaagtgagcatgcacacaacctcagtaaacacactgtgcatgtggcttctcccaagtactagcaggccactgcacatgtcacaactgagcaacagcccaccccaatggagggatcaagggaggagaagaaaaaccccggaaccaaaagccagtttataaaaatcctgagccaaaggctgaggggggcacttgatctctcaagttccctacttggccctcttccaagtgtgatttgcttcttttaataaacctttgcctctgc

SEQ ID NO: 1045 - DNA, 458 bp, Homo sapiens
tcctacagtatgtgaatgacctgctaatctcctcccccacaagacaactgggaatccaacatctagtccagacactacattttcttgcagacagagggtacaaagcatccaaggccaaggcacagcttctcagacaagaggtccaatacgtggggataatcctgatccctcgagaacataagttctccccagaacggatacaggccatccttaaaatacctatcccagccacccaaaatcagcatcaggcctttctagggatcacaggatattgcagactttagactgggttatggtgggattgttaagtccttatattagactctaaaagaagggactgatagggactcacttctctgggaaaaagatcaggagcaagcctttaggcagctaaagactgctctctcataagccccagcccttgggctacccatactaagcaaactgttttagctttt

SEQ ID NO: 1046 - DNA, 27148 bp, Homo sapiens
  SITE (22804): n equals a,t,g, or c
tttatattggaagacatggatcttgctgccaacgagatcagcatttatgacaaactttcagagactgttgatttggtgagacagaccggccatcagtgtggcatgtcagagaaggcaattgaaaaatttatcagacagctgctggaaaagaatgaacctcagagaccccccccgcagtatcctctccttatagttgtgtataaggtaaaatgtttcctgagttggtaattgcttcaacagaacacaaactgttcaacattcttcacaaatgctattgttgactaatcccaccactgagcattggtttttccgtgaataaattggcctttgctcttgttaccatgtgttactaggaaatttgactgtgttgttaaaggtcctagatgaaagctgcatatttacagttaaattatatttgtgtaatattattatttaattttttattatttgtttgtttgttgtgtgtgtgtgttttgagacagagtctcactcttgttgcctaggctggagtgcaatggcgcaatctcggctcaccgcaacctctgcctcctgggttcaagtgattctcctgcctcagcctcccaggtagctgggattacaggcgtgcgccaccacacccagctaattttgtatttttagtagagacaggttttctccatgttggtcaggctggtcttgaactcctgacctcaggtgatctgcccacctcagcctcccaaagtgcttggattataggcgtgagccaccacgcctggccttgtgttttgtttttttttgttgttttttttttgagatggagtcacactctgttgcccaggctggagtgcagtggcgtgatctcagctcactgcaacctccgcctcccaggttcaaacgattctcctgcctcagcctcccaagtagctgggattacagccatgtgccaccacacctggctaatttttgtatttttagtagagacagggtttctccatgttggtcaggctggtcctgaactcctgacctcaggtgatctgccctcctcggcttcccaaagtgctgggattacaggcctaagtcatcgcacctgaacagattttttatttttctagtcaaggtcacactgtgttgcccaggctggagtgcagtggtgccatcatggctcactgcagcctcgaactcccagactcaggtgatcctcccatctcagcctcccaagtacctaggaccacaggcatgtgccaccacacctggctaatttttctattttttgtagagatgggggtttttccgtgttgtccaggctggtctcgaactcctgggctcaagtgacttgagtccagtcaatcactgtcagactgagttcgagactgcccacctcagtctcccaaagtgctggggttacaggtgtgagccactgcagccagcctttatgtatgtatttatttattttttgagacagagtttcactcttgttgcccaggctggagtgcaatggtgtgatcttggctcagtgcaacctccgcctcccaggttcaagcaattctcctgcctcagcctcccaagtagctgggattacaggcatgcgcaaccatgcccggctaattttgtatttttagtagagatgggagtttcactatgttggtcagctggtctcgaactcctgacctcaggtgatccactcacctcagcctcccaaagtgctgggattacaggcatgagccactgtgcctggcctaatacttgtatttttggtagaggtggggtttcaccatgttggccaagctggtctcgaactcttgacctaaggtgatacacccgccttggcctcccaaagtgctggaattacaggtgtgagccactgcgcccggcccctttgtgtattattattattattattattattattattatttttttttttttttttttttttttttttttgagatgcagtctcactctgttgcccaggctagagtgcagtggtgcgatcttggctcactgcaagctccatctcccaggttcacaccattctcctgcctcagcctcctgagtagctgagactacaggcgcccatcaccacatccggctaattttttgtatttttagtagagacagggtttcgccgtgttggccaggatggtctcgatctcctgacctcgtgatccacctgcctcggcctcccaaagtgctgggattacaggcgtgagccactgcgcccggccccctttgtgtattattattattatttttatttatttatttttattttttttttgagacggagtctctcgctctgtcgcccaggctggagtgcagtggcgcgatctcggctcactgcaagctccgcctcccgggttcccgccattctccggcctcagcctcccaagtagctgggactacaggcgcccaccatcatgcctggctaatttttttgtatttttagtagagacggggtttcaccgtgttagccaggatggtctcgatctcctgacctcatgatctgcccgcctcggcctcccaaagtgctgggattacaggcgagagccaccatgcccagcctgtgtatttttaaatggtgaattttaaaatacactgattatatggtagcagcttggtgagccttgcagtccctatagttctcaaattctaaattcttccagaagtaaacctaagtggcttgtttatgaaaatggattagttcttaaggcacattggaagtagcagaagaagcctgttttgttttgttttttttcttggtattaaggtatttgtttgctgggattaatgccttttctatctttccttgtaggttctcgcaaccttgggattaatcttgctcactgcctactttgtgattcaacctttcagcccattagcacctgagccagtgctttctggagctcacacctggcgctcactcatccatcacattaggctgatgtccttgcccattgccaagaagtacatgtcagaaaataagggagttcctctgcatgggggtgatgaagacagaccctttccaggtaaaatgcaacatttattacttattagatatagttttcttgacagtatatgataggaaaggaagtaacatttattgatacctaatgagaggcaagctccctatattgtatcttttaattcagtccccactaaaactctatgagatggggtttattatccccgtttcacagattaagaaaccaagggtcagagagattaagaaactcgctagaggaacatctggtagagccaaatacacacccccaaattccagaacacacatgatggggacaaatgtctttgcccataaaaaggatttgattgtatctcatccttttctctcctgtgattcctgtccataatgcatatttaatacataggtattggtttattgaaagcaaccgagttcagcttgcttctaaaggtcctctaacagtccttggcctattgggctaggtttttgtctgggtatatcccactctttcagtttagtccttctgtctgtcacagctcatttaatttagtcctctaaagtatatcaattttgccagtaagtagaaattaaaaaacacataaatttagtaacagtgcatcggtggcataagaattcatagtctgatagactatttgaggggtttccttttgagaacagtgttaacatgtaataagagttgaaatttactttttcaggctgggtgtggtggtttacaactataatcctagcaatttgggaagctgaggcaaaaggattggttgagcccaggagttcaagaccagcctgggcaacatagcgagaccctgcctccaattttgtgtgtgtgtgtgtgtgtgtaaagaaatttactttttgagaaagggggatattattttgggatttttttggtgatgtttatcttatttggcaatgtagaataatatgtgtattaatatcacaaatggattatagaatttattgtgtaaccatgatccgaaacttttagaatgtgtcttaaattttaggaaaaatgctttcagaaaaaatgtatttaagctttataatcataatgtcattctctttttttttgagttggagtctcgctctgtcgcccaggctggagtgcagtggtgcgatcttggctcactgcaagctctgcctcctgggttcacgccattctcctgcctcagcctcctgagtagctgggactataggtgcccgccaccacgcccggctaattttttgtatttctagtagagacagggtttcaccgtgttagccaggatggtctcataatgtcattctttaagatctaatgagtcataaaaatcatcccttggattgggtctccatcgaaagctatttttgtatacttgaggaagtcatggaaaggtttccaaaattgtatcaaaatcagaggaagggaacattgtaagacaagaattccacctcaggagtttttgtttttttttaaaaaatcaacagctcagatatttcatttgaaaatttcagatgtaacttccttgtatttattgggaaggttgcttttgaaatgtcaccaacagagctaaaaaaaaaaaaatgcagtctcaaactcctattagaacggttcaaagtgtttggaggaaacagcgagagaaacttgtcagttaggccagtctgtgcctcttcctcagacacaccagtctcctttcctgactgtcttcccctcaaagcctccctaacggcaactcctgatgagttttcctgacctggttgatggcattatcttcttccccagtcctataaagtaaatctccatacacggttgaactgagaaatggggcatcgtcaatgaacactgctcgcttcttctctaaatcatagtttaaacattccagaaacattagtgtcttgtaaacaagctggattatttggactacttcaaatcaatattttgccttgcagatggaaataaaatgagtccttggagctcagttgtagagagagcgagtgagcattggaagggtgtggctttagctctttaatgttgttgattctattaaagtgctgtttttacttgtaaatgtggatgtggaagcaccatattttcctatgtatgataattctgggaagctgtagacatgtgaaactaacagcattttgcgtagcatttggaagaaaagttaaaaacacgtaattatatgaagagtaaacagaaacacatgagggagaattaagtgcaacttaatctgggcctgtaagagggcaggaaaagtaaaaatatatcattttttaatgtcctggtatcaaaaaacaactaccttcaggttaggattagttggccatacatttaaagtaaatgcaaggggagaatggtgtgacagattcccgaaaggaaaccccatatggtttcctgaagtgctggcctgtctcacactcccagggtcatctggtgctccttgcagtggcacctcgggaatgatggagggcagctgcagccttggtgatgtacaagaggcaccaccaccaatgactggaagtttcccctgaccccacccagggaacaaaaaggtgacagaggtggggttctttttctagatttcagccttagataggaaatcctgcccctaaatgctctcaataagaagaatgaagtgactttgcagcgagtcatggaaacatcccgctctgcagcaaaaaataagtaaataaactgacagttgtttattacttaccagatgccagaccctgttcagggggctttccatatatcggcttatttaatcttgacaacatccctatagggtagcttcaggttttatgcccattttacagatgaggacactgaggcacagtatggttaggtcacttgctcaaggtcccaggtctggtcacggagccatgatttgaacccaggcagccagtcttcagagtctgagcccttcgcctctgatgtgagtagtctgtagctgtgcagtagacctgaagagtctagctttaagtctgatgttggagttctaccactgtctctctcggatcatcagttactttctcttaactccctagtccctgaagagacaatattctttctggctgttccaaagataagtggtcttccaagcttctgaccctttagaattttcccgacctggtgttgtcttagacattcagcccagttcatcctccctagtctgcaccctgacattcagcccagttcatcctccctagtctgcacccttatggataatatttgactgacttaatccttcctcttactgacccagagttttctctttacattcacattcttactgcttttctcccctcctggcttcatatctttatagtcactttactcctgccggccatccccttggtttttaccatttccatggaatcattgagtcttaaagccagaaaagaattttagagttaatctagtacataccccattttataaaagaggtaactgaggccaggagaggtaaaggagcttgcttacccagctaaaagtggcaaaatcacacttgaaccctagtttcttaactccctctagcattctgtccaagatatcacacttacagcctgccatctctgccctcagtcaagccaggcgctagcatgttcagccaattattttgtttactttggtcattttctggccaacttaaaaataacatattcatttctactgaggaagcctgggatagttctcacatacagtgaaaaggcacacatttggaactcgatgcatcccgtaaccttcaaaggaaggatgaagtagatccagcaacatcaagaagttttggaaatagcaaatcatttattggcctcaaactaagaatctagtaagacttagagagtccagatctgtgctcaaagatgaactgcttagaccgcaaggaaaaccttcctcttttatttgcaaaataagcttaccttctgtgataataacagctctgtcaagcacttactgtataccaggtactgtgccgtgcagtttatttctcagtcttcacagcagtcacataaggtagatactgtttttatgttcatttcaaagatgaggaaactgatgtgcaaggggattgactgacttatctgaagtctcacatttatttatttttaattttttcttttgctgtgtttttgataataaattttcacatttagaaacaaatttttgtacaagtgagaactcatgaaaatagactttctctgtggtttggagtggttcaaatgcattgcttcctggaggcaaggctgttggtgaaatgatttcttgggctctttccctctacggtgtgtgaaaatggctctgggcatggtgccacacatgcagggacctggcagaagcctccttcattgtcaaggcttcacccctgcctcatgcccggggtactagaagaggtgctatgcacaaacaagcttctggagagcagcctgattaaatattgagcacacactagtgaaagtcatgggaactttgtcatgggctttgcagggttttcttggctatatttataatgcaagaaatgatgaagttatatttatttaatctttattttgaggtttctgtgaatccagattgctcatttgatttttctccccatggacttaattctattgttaaagcttctgaaaaatcagccttcctgcctgccttcctgccttcctccctccttcttttcctccttccatcccttcctccctctccccaacttcattcactcattcagtaaatgtttattgagaccctgctatatatgccaggcactgttctcaacaaagcagtgaacaaaacagacaaaaccactgctcttgtagagctagtattggctttgttcttttctttcttccctatcctttttatccagagggagttttttgtcctggaaagaaatcttttgttttgttttgttttgttttgttttgttttgtttttgccaggtaaataatctatgtaacagtactctccccactcagaattccaggatatgttatggttgtctacagagaaccagcctaagtgagttttcttgtaaataactctcaggcaccaggaagctccctgatgggtgagacgctggcccatccatttttctgcccagtgcccaacttgtaaagaagggtggatagttatggtctctgcacgttgacttcaaggctgtgttttgtctgagagactgtttttgacatctccaacagtgaaatcattccaaatcatagtgaaaacttgaaatacaagttataagctttattgaacttttatatgtaggatttctcttctctgtcatacctttaaaaaatgtttaaaatatctggtatgagggatatctggagtaaagaagccttagaaattaaaagtaggaagttgctatataatttacgctgacttttctgtctggtgcttcaggaaaagtggttagaaacaggagggctggaaagaagtgagatgcagcatattaggtagtcaaaagccgtaaactagggtggcatgggctcggctggctgtgtgctgttggctgtttcccaggatggaattttgttcactttgtggcatgatggctccagccagttgtatagagaacacgtcagacaaaaccttttcagatggacagaggccaagctggagtctggccacatctctttctgttgtcagggactctgtggggagaggaagaggagcctgcaccctacctccacccctagttcaccgtttgcccgttcctctctctaagcttatgctttatccaccttggtgatctcaggctacagagaaatcaaaagtagttctttcttttaaagtttgggctcccttagttcaggtggatggcataggctaccccattccagtgatccttttttcttgttacttcccttccttctttgcgggccaccagcctggccacctctgctcctgtcagatacctctctggggccagccttctgagatgatttacctctacacttcagcattgaattctcagcttcagttttcatgatctccaaggacattttgacttggaaagtacataaaatacatgcatacaaagacagtaagaggtgtaatattttgatatttaaaaatacttataataaagtaatatttctcatctctatccttttaacttttctactcaagcaactgctaataataacttggtatacatccttctgagtttttccatgtctatacaaatagatatacttaatatatataaatagaaatacttttttgttcacacacatacaaaagatctcatatacatatttttggctagacacattgtattagtttctaaggctgctgaaacaaagcatcacaggccgagcagcttaaaacaacagaaatccagtacctcacagttgtggagtctagaagtcagaaatccaggttgatagggccacgtcccctctcaaaggctctagggaagaatccttcctggcctcttccagtttctggtggttttcagcagtccttggcattccttggctgtgtcagcataacttcagcctctgcctttatcttcacgtggccatctgctttctatgtgtgtctttgtgtcttctgtcttcttctaaggacatcattcagattggattcagggctcatcctacttcagtatgacctcatcttaaatgactacatctgtggccaccctatctccaaggtcatgttctgaggttccaggaaaatgtggattttgggaaaacataattaaaccctctctatatatttttgaggattttatattagttgattctgtgactcttctataatttaaccattttctagggttgttgtgggttttttttttttttgctattacaaaaatatgtacctgagagattcatatacacatatctttatatagatatactttttttctgtaagatatattcttggaaatggactcgctgagtcaaagggcatgtgcattttaaattttaataaatgcaaccaaattgtcttcataaacttataccagcttatactttcattaacagcatatgttgatcattgacactggatgttgtcaatgttttgccagttagaaaactaaataatagtatctcatttcaagttgcatttcattgattattagtcaaattgcatgtcttttcaaatggtttataggccatttatatttataatacttttctgtgaattccttgttcatattttttccccattaaaaatttttttatctaccctgggcaacatggagaaaccctagctctacaaaaaatacaaaaaattagccatatatggtggtgcacacctgtagtcccagctactctggcagctgaggtgggaggatcacctgagcccggggaggtcaaggccacagtgagccgtgattgtaccactgcacttcagcctgggtgacagaatgagagcctgtctcaaaaaaaaaaaaaaaaaagttttttgttaattcaaacagaggcttatatattagaaatactgattatttgtctcgtatatgcaaatattggtcaaatctgtccatttttcctttatagcctctaggaagccttccttgtcccaaagattataaaaatactcatttctcagtcctcacaacagtcacttagggtagatactgtttttatatccatttcaaagatgaggaaactgatgtgccaagggattgactaatttatctaaagtctcacatttacagacacatttttatacaggtgagaactcatgaatatatgtgaactctctatggtttggagtagttcctctagcttttttttttttgagacaggatctcactgtgttcccaggctagccttgaactcctgggttcaagagattatcctgcctcagcctcctgagtagctgggactaaagtgccaccatgcccagctcctttagttatttttaaaattttatgttatctatttgtatcttttaatcaatctagaatttaatttagtatatggtgaaagggtaggaatctaactttattttcttccatatagatggtcacttgtcccaatttgatttattgaatctaccctttcctcacttaattaaaaatctatgtttatcctttattggccaggcatggtggctgacacctataattccagcactttgggaggccaaggcgggtggattgcttgagctctggagttcaagaccagcctgagcaacatgatgaaaccctgtctcttccaaaaatacaaaaattagctgggtgtgatggcacacactggtagtcccagctacttgggaggctgaggtgggaggatgacttgagcctggaaggtcaaggcgacagtgagctgagatgtgccactgtactccagcctgggcgacagagcaagaccctgtctctaaaaaaaaaaaaaaggctggtctcaaactcctgggctcaagcgatcccacctcagcctcccaaagtgttgggattacaagcatcagccaccacccataaatgttttatcttgttaaatttattgctagttattatgaatgagattattttccatttcagtttttaactgattgtggccagtagagtaagaaagctattgatttttatgtatctgaaaatctgtatcttgtattctgtcaccttattaaattctctttttagtactaacagttttttacttgtgttcgcctctaactttcagttccctcaaggaacaccacctccaagtttttcttttagtttgctattcctactttctttttctttcttgatttccctttactgggttttcttctacctgctttttaaagggatctccacctggaaatcccaagaatatctaaagctctgaataaaattaaaattaaataagttaggctgggctgggcgcagtggctcacgcctgtaatcccagcactttgcaaggctgaggttggcggatcatctgagatcaggagtttgagaccagcctggccaacatggtgaaaccctgtctctactaaaaatacaaaaatgagccaggcttcgtggcgggcacctgtaatcccagctattcaggaggctgaggcaggagaatcgcttgaccccaggaggcggaggttgcagtgagccgagatcgcgccactgcactccagcctgggcgacagagctagactccatctccaaaaaaaataataataataataattaaataaattatagttaaaataattctcctaactcttaggttaagagctgctcggtgctagcccatgcagcacctttatacaaattcgaggaaggtgcccctttctcctggtgctttactctcatctcctgggaagactgtcataattaactgattctgttggaatatgacacgctactacagaaaagtgtcataataaatctgcagatgacgttccctagatgagcactaatgacataggtgataccagagatctgcaggtttattatgacactgaccaagaggacagtatagtgcaaacattcacagtagtgctccttggggctgtagatttcatcttcactgcttctagaatccaccccttttttccattcccactgcctcattcattatatttcacttctcatcacagtgaacccccccccccccgaccttttccctaaaaaagggcaaaaccaaaatataaccagatcttccttttcccagcctctctcttctagggcaccctaatcacaatccagaataatcttcctagaacatcgagaaattcctgctcaaaagcctccaacagttcctctttttgttctgagtagagccagacatgcttcaagccctggaagccctcaccacatcttcctctgcagcctgtttccttacccaaacccccactgcacgcccagcatctgctgtgttcttcctgccacactctggcacctcaggaacttcctatcacctctaactttcagtttgttcatccacagaatgagaatagtgattcctcctcagtaattacacagtgaaaattaaatgctataacatgggaaagtgactaacatagggcaagcactcagtgcattagcttgctttctccttccccttccatcgcaagtactttggaaaccgaaatgctatataattgtaacatgttgttatgattatgccccatggtgtgtccattacccagagcttttgcatattggcaagaatttatcatatttgacactgaataagaagcatttgaaaatattggagaagaaaaaatgcaactttgcagcctcagtgtgccactgaaacaggtggtactaaagggttttcagctacccccagagtactgtgggaggagaggcgccctcccaggagcagggtgtagcggtaatcctctgactaataatcttcctgcgagttgagactggctgagaaaggtaggtggcagttgcctccaggaaacacagatactatcttcaagagatggaggatgctcagcagaccggccaagaacaaacacggtctttccctgacgaggatttcctatgccccactactactgcctcagagaaaacaagcatgtagtgcttactgccaaccacagaaaatgttttgtggttaagagtcagtttccaagtatgtttattggtttaaaaaattgacttcgtttcagccacatttggttgtctgttatcatttgtcgtaggctctctcctgatttggtttccattgggttttaatcagaaccgtcttctgaaacgttttagattcaaagcagagtttaaaacaaacacatctctcagagaacctagacgaaatccaaaatggaacagaaagtaaacaagaaataatgaaataacattataaacagcatggtaacagagggaagctgggaaaggctgtgcagaaacaagagcccctcagagaaggagccaaaccagacaggcatgtcagggagccgctgtcacacagcagggtctgggttgggggtcttccatttctgaccagcatgtggggctggaaactatggctggcggccccaccccctcctgagctgggatagagggctgtcttatggacagatgcaattcactttattccaaagatggctccagaaaagtcctgtctaccctctccatccctttcctcttctgtgtccttttctcactcttccttcccggagtcctggctcccatgtgtacttgtgaagcaagggtctatgcacacatccagcatgtgtgagaagtgcattagggcacagcgataataggggtcacccttctatccacaccagcccccctgtgctgtagacgtttcagccatatgggtcataggttagaaaatgttgggggaactacatctttagctccacattgctgaatgtttttcctagctgttatgctttatttgttgatttgatttaggaaatgcatgacaggttaaaagatattttccacaaagtgtaaaaaggtatacagagaagagtacctctccttcctgctcctgtcctctactccctcctcagaggctgcttcatatataccttaccttttcagcggtctccagtgcttatcattgtttgtttttaaaaattattatgggctggatgcggtggcttgcgcctgtaatcccagcattttgggaggccaaggtgggcagatcatgtgagcccaggaattcaagaccagcctgggcaacatggcaagaccccgtttcaactaaaaatacaaaaattagccatgtgtggtggcatgcgcctgtagttccagctcctcggaaggctgtagcaggagaatcccttgaacccaggaggcaggggttacagtgagctggacggcaccactgcactccagcctgggcgacagagtgagactctgtctcaaaataaataaataaataaaagtcattatgatgtctttcctttcttgtttcattgttggagctactggatgtaccagctatgctctttcagtatctgttttctccatatcccttcctctctcagactttgacccctggtggacaaacgactgtgagcagaatgagtcagagcccattcctgccaactgcactggctgtgcccagaaacacctgaaggtgatgctcctggaagacgccccaaggaaatttgagaggctccatccactggtgatcaaggtgagcagaagcctgagtctcccgctgattggctgcttgcttaaaggctaggtcaagctctaggaaatttctgacaagtaactctgtgttgttttgttttgtttcctgccttgccaagacgggaaagcccctgttggaggaagagattcagcattttttgtgccagtaccctgaggcgacagaaggcttctctgaagggtttttcgccaagtggtggcgctgctttcctgagcggtggttcccatttccttatccatggtgagtgtgaaaagggccgggcacagtggctcatgcctgtgatcccagcactttgggaggccgaggcaggcagatcacttgagcctaggagttgcagaccagcctggccaacatggcaaaaccccatctctactaaaaatacaaaaattagccaggtatggtggtgcatgcctgtaatcccagctactctggaggctgaggcatgagaatcacttgaacctgggaggtggaggttgccatgagctgagatcgcgccattgccctccagcttgggtgacagagtgagactgtgtctcaaaaaaatgggggggctatgggggcacttagcgtgcgagtaggaaaggggcagaccagaaatacctgcaaaacagtaatagctatcactgagccactaccacaggcccaacactttacaaatccaatgctgggatcccactgataaaccagtgatgagagataaaagggatggatgaagaggtgtgtcagaaggaggggtgccaccatgggggggacagcaagtttgtctaatagagtcataatttatttcgaagtatgcatttagcattttatgtagaatggggcctcatgcagggggctgaagagagagtgcaaataatagaaggagaattgcattttttggcacttgtttctgccaggcagtgtggcttggtgcttagtgtctgtgtctcactggggacactgataataactctggaaagtaggaatgattgttgtcattcttcagatcagacaagtggggatcagtagctaggcgtggtggctcatgcctataatcccaacactttgggagtctgaggcgggttgatcacttgggcccgggagttggagaccagcccaggcaacatagggagaccccatctctacaaaaaatatccaagctacttgggaggctgaggtgggaggatggcttgagcctgggaggttgaagctgcagtaagccatgatcataccactgcactccagcctgggcgacaaagtgagaccctgtttcaaaaaaaaaaaaggttgggggagggggaaagaaagaaagaaaaatgggaaacagagagattaagtaacttgcctaaggttacccagccaggatcgaaaccccagtttgtcctgctgttccttcctgtgccctgcggaagacatggttcattccttgtggttaaggttgctgtctagtaagaaaagaaagccagtttccatcttagaactgtttcgaaagaattaaaatgactttttcaggctttttgttaatttcttaatgcttctatctttctttaaatgtgctgtttgtttgcgtgctagagtgcccagttgaacaagctgagcaggcttccccctgcgtctccctgtgcctcagaagaagggtcatgctttttgtcccttcctccttctctcttctccccttcccccgcctggcctgctgttacttcagtcttttccaagatagaatgaatagattatttctttccttccaatatatattgttttagctgcaatttagaaacactccacccacatactcaaatcatggctgtagagtttatgcctgtgtgtgtacacattatagttcattgactctgtgcaactattcttcagggacctagtacttaagatactgtactcatatttttccctctttacccaccgcccacagttttcccacccttacttggctctctcttagtcatgggctggcttgaccagtttaattactttttttctgtttcatacttctacaggaggagacctctgaacagatcacaaatgttacgtgagctttttcctgttttcactcacctgccatttccaaaagatgcctctttaaacaagtgctcctttcttcacccagaacctgttgtggggagtaaggtaggaaattttgagaggacttggatctagaattttctttatttgggacctggactgatgtcataaccaaggccttccctgcatattggcttagagggttacagggtgaattgaggggacacccacacagtctagttctcccctcctgctgctagccaggagacttgcaggggcccaccttgtcatgaaggcaggtttccagaaaatctagttaccttgcaaatctgcctcctgcccttaacacctgaggcaaactacttttctatattaaaagaagtgaaatcttaaaatttgaaggacttgagggtgcaattagtctggctttcctaccttaaattagaaagtaggcaagcagccatgatcggtggtcgctcacgcctgtaatccagcacttggggaggctgaggcaagaggattgcttgagcctaggagtttcagaccagcctgggcaatatagggagaccctatctctattttttcaaaaaaagaaaagaaagctataaggtaatagtatgtggatgaatagaataactgctccattttgtggataaggaaactgagtcccagagagattaagtgagttgcccaaggacacaccctttaccctctcacccccaggatggtttttgccagaaataaacaattaagagatttcaggtagagaacttgaaaggcaaaaagtgtgggagcctgggaaggatttgataggcaggcagcccagctggggtagaaaagcccactctgcccccatcatttcccacttcagtctggggccaagtgctcagagccaaagttacctctctggggccagtggactgggagaagctgttctgcatttgtgtctgtttacttttctctgaattgctccttttgttgagtctcattcctaaggaaggtttttgagcctggatcggtttgggagaattaaaagcatgcattttccttcataaaaaaataaatttcccaaactatggccccctgccacctctggaccatggcttccacctcctgatactatcgcttggctccaaatttgctgaattgtgttaaaggaatttaaaagcctataaaaacaatcattttgtctagaagtaagaagttctgtctgccagcactggggtggagatgctgggctcttgcctcagattttaaagaagtttatcctgctgtcgccggctggaattccaggcccttgtatgatttcatcttcataaatataattctgggacacggctttatctttctcttggttttaccacttgaataccaaagttaatttctccagcgtgtgcaacaccaaggagcccagccaaaggagtaaatacagagttactcaaatgcttacgagagtcatgctgtggttctcgaggatgttttgggaagggcagtggccagacaggcaaaactcttgagaacccagtttcttagagaatctgtttccccaccctggcccaagctcccctttccccgcagccttgttaccccaccctgttgtccacatccctgggccctgggccctgggccctgttaaagtcacgtgtctgtgggcccagtgtccaaaggcagccttgggacagaattggggagctggttgttaagtggcactcggggagaaggtgagggcctccaaggcccacttcacccactccacggtgtggcctagggctggcctgtgccaccctcttgtctgtttcttcccatcctgggaatggatgaacatgaccctgcccacttcaggcctgtgtgaagaagggatacagccacttgttttggtccttctgagattgttttgaggactacagatgttaaggcttctgccaatattagtaccagtcaactgaaggctagctgaagacaccaggctgtccctgtcaccacattagccggtgaaatggctctggtgttgccatgaaaacattatgggcaaggcctgtggcagcagcagagagaacagggttggggacaggggaagatggggccaaaacccaagactctggaggccctgagtggtgaagagaaaaccaagacatggcccagggagtcagacttctggctcccactttatatgggcatataaagggtttctctgaagggcaagagataggaggaagagatgagagaagaggccctaggggttttctgtcatcatcaaggtaaggagaaatgtcccagcaagacccatctctctctttatccctattccttgccctggtcccagccccaccccagggttcacagctccttccctggcacatagcaggttgcatttaatgcctgttgctggcagtatcatgccctcagaggggcagtagttacctgtgcaggtgcatatgctgattgtctccttagttttcaaaatcagaggccagtcttagtgtcattagtttttaatcggtagcatggcatatctgctcccctgggtcttgccaggcagtgtaaacttaaacttgctgctgtacaattcttatcagggccctggtagtaagaaataacattccatggaagagtgcccaaaggatatgctgattatctatttatctaaaaagttttcatcaaaccagaatctcagaatgttgtatacttcagccaccatgtgctggtttctgctggaactacctttgttaaattgcaattaggtatttttctttggcttactttgaagctgtggctaaaaatagttgcaaattacaaagctcatgcaggatctactctggggctctcgttgagggtattgcccactaaatcacacagtgcctctttaggagaacccatagaagagattttactctggtcttagtaccaagagatgccattcttaggagaaagtagtttgtttttgtcttttggacataattgcaaatttttgttattggttctatttcctctttgcttatgctaggaaactcagagccatatgtgaaagcatttttatttactaaaccccctggttttatttcgttttctttgccttccttttcctcccctcctcattctttcctccagatgcataagatgcctgacctatttatcattggcagcggtgaggccatgttgcagctcatccctcccttccagtgccgaagacattgtcagtctgtggccatgccaatagagccaggggatatcggtatgtagggccccaggagggcagggtcaatggatctttttagtttttaactcaaaagctattttaagaatcacatactgccttcacaaaagttttatttagtagaatcaaaaataacattctcctgttaacaggctcaatatttatgcttagaaatgaaacaacttaatgagaaaacatagcagaaagaaatggcttgtacatacaacatatagaatgcgtgtgtctattgatcatagaaacttcaagttaggaaggattctggaaaatatttagaccaatccctcgttttatagatgaaaaggttgagacccagagaggagaggtgaccaccccaaggccccactgtcagtcgagcagagcgtcaggtcttaagtgcctgcttgaacacagtcaagccaggagagggacaatcaaggactacaggaatatatacccattttgcaaataaaacaataccaagcagtatataagggcaatggtcacacaaggaaatgttaccttctgtgtggctgccacagccaagtcacagcctcacattgatgactcacccttgaccctggctcagtgtttgcccaaatgtgacttgtcctgtgccttatatcctaattaaaaatctgttccaaagaaacaggtttgaatccactgctgtcagtagcaatctgtttgacagccgagttttcttggaagaagcaaataaatcagcgagtgtcaccattgacctccttgcttttcctgcctcacaaaacctaggcaagacctggagtctctggcagagcccagactggttttccaattgatttcttttaattttacccattcagaagacccccaagcccctagaaaccttgcatctcatatgagggtaggaattggactgcaagctatgccaagtcttaatttaggttacataacttttatttcaattcagaaatgaaaaataaaaataaggtacaaatcaagcattaactaataatggagcacagctggcctggctcttgggaaacttcctacaaaaacgaggattcttgtatggaaatcgttctgaatctttttcctgtaatggagtgactcttaacacaagagatgactattgcgaaaatctctctggcatatttaggtttggagcatgtggttgtgcttgaacaagtttctgttttatattttacaaatgcctaacaattcagacaactacagaaacaccttagttatctgaattccagacttccggctcccacgagcaaccggaataccaattacagaattagggaaaaattaaaaaaaaaaaagtctggcagtgatcaagaaagcttgagcatcaaatgctggtacagatagtccagattagcctaacatccggtgcatgatacctgctgtgctgtgcctggctggtttgttgactagaaagaaaggacccctatagttggcagtgtctataaaaggccagtcacatgacagaacacagagatggatggggactgaagagaagaagaagaggagagcaagtctgggagaagaatgggggcagggaggggtggggaagccagcgagcacctgaagcagtgacagaaatagacatgatggctgtcactgccacggttaacaatgaggacaggaaagcagaccctgaccaagaagaatcattcagtgttacaggacagatggcggttcctctaccttagggacccttaagaatggcaccatgacatgcaagttctatgatttttgacaaaatgtacattttcctgtggagatggaggggagaggggttccagatcaccagaaaaccttttgggggtcaggtacaacatctgcagtcactgtacaggatagtcattgcccatcatgaccaagtcaccaagtaaaagttgaattctactcagtgctcttcatttaaagatgagcagggcccatagtacgctagaataaatttcccatcaagagattttttttgtttaaaattttattttcttatggtaaaaacacttaacatgagatctaccctctcaacgaatttttaagtgtacaagacagcattgttaggggctgagcagggtagctcacacctataatcccagcactttgggaggccaaggcaggaggattgcttgagcccaggagttcaagaccagtctgggcaagatggtaggaccttgtatctacccaaaattacaaaattagccaggcgtggtggcacacgcctgtagttccagctactcaggaagctgagttgggaggatctcttgagcccaggaatttgaggctgcagtgagctatgactgcaccgctgcactccagcctgggcaatgaagcgagaccctgtctctaaaatcactgaattaaaaatttttaaagccatgcgcgatggctcacgcctgtaatcccagcacttggggaggtcaaggcgggcagatcacctgaggtcaggagttcgagaccagcctggccaagagatgatgaaaccccgtctctactaaaaatagaaaaaattagccaggcatggtggtgtgcacctgtaatcccagctactncggaggctgaggcaggagaattgcttgaacctgggaggtggaggttgcagtgagccgagattgcgccattgcactccagcttgggcaacaagagtgaaactccgtctcaaaaaaaaaaagaaagaaaaaaagaatttttaaaagtattgtaaactataggcacaatgatgttcagcatcactggggattattgaaaggttgaagtttttaggtttaccttcatagcccactcaaatgataggtcagtgtttcctaaacgattcttcagattactcatgaccccacaggtgggaccagaaggcctttgaaaagacccttggcaagtagggtctcgagtcagtcgactttgggaaatgcctgtcttgttgatgcatagtacattattagtgtatcaaagatgttgaaaagccttggggaaacctagtgtttctcaggcttacttggccatggaacctattttctttggaatatcttacaggacactactgtttgccaaacccaatttgggcaatgctggtttaggtttaggttaatctggatgttctgtaatgaaaccacattatagatagacacaggaaaattggctagtaggtcttgtgtcccctcggaatccattctgtcttcttgctgtaaaagctgagacttgatgcccaacagcagcctcatctagagcatcctgcctttgtaagcctgctgaattgtgattcacagttccctgggtgaggggtggtgataaagcatttaaagaggactgataataactaggaatacttatgctaggaagtgccagaagactttcagagcaatttgtctttaagccaggtgtagtggcccacacctgtaatctcagcactctgggaggctgaggcaggagaatcacttgagcccaggagttcaagaccagcctgggcaatatagtgagacccctatctcttaaaaaataaaaaaggaaagaaaaagaaaaaaaaggaaactaaattaaatagaaaaagatttgtctttgactctgcagtgcaccctgagggccagctctggcagacctgccttgctcgtgcccacaggtgtgcccaccctctgacatttacatgccttcctcttgctatttcccctcaaggctatgtcgacaccacccactggaaggtctacgttatagccagaggggtccagcctttggtcatctgcgatggaaccgctttctcagaactgtaggaaatagaactgtgcacaggaacagcttccagagccgaaaaccaggttgaaaggggaaaaataaaaacaaaaacgatgaaactgctttctgggggttggttacttagttacctgccctttgcatgcatgtgtgaaccagctgtgagctgcaaggcagtggccagagcctcgccctcctgactcttcctgcaggtggctcaggaaggattcagcctggccacttggctaggactctgccagcacccatctgagactgacctcttccgggcctttggacactatgaccttgatgctgcccttcaggcaggaaacagggctggtgcctttcttcacctgcatggccagcttccttccctggcagtggagagggcagccaacaggttctaatgtcagagccatcctttaccaggtgggcctgcttgtccctgtcttgcctgccacatcactctactttttggaaggccatggctgattaaagaagttcttgtagtttcccaagcaaagtggaatctagaaacagtgaaaaaagttcagataactttgaattgcattcaagaagtacacttctttcccattgtccgtggctcttggagtctccgtgatgccaggctagagtctgattatataataattcaaaatggtaactcccaaggtaatgctttcttccatttcatcaggttcttttatccccactgcaccccctccccttctcccttgcctatctggatggcttctcagaagctcggccctagtcctccctgccttggcggggccagagcccactactgctgaggcagcactgctctcgtcagctgtgttgcctttaccaagtgtcttcagagggttatgagttagagtagctggcctggggagagggtgcctccctgggtttgatctttagggtctgactttctgcagagaagatgttttacagatgtgtcaaagctgatgtaatgtggttgggggaggaaatccagacccaaagtgtttgtcagctgggtgtacaactgcctatgtgatcctctgtcttaaaatgatttctgtctgtgctgcgaaacaaagacaaggtgaggtgtttttcttttttgtaataatataaagctgtgtgtttctgattggatgattcactatgtgcattgttttctcctaagtgcttttagtaggtagcaatcaaatggtgtaaataaggatgttcttttcctgttccttttatttttttctctctttattattcttttattgacaccactagatagctggccactggtcatgccattgccaagatgaagaaaaagcaaactacactttggcctctggttctgaattgcagaaatcaaaggatgcagtaggtgtctatgtcagaattatggatcagaggcagacaatgacgagtgaagatggttgtgaagccctcttcattcctggaggagcctgcatctcatctctcaggccctctttctctgtgggtctcatgaacagcagtggggaccattgagcacttgaatggcctgtttgtctatgggcttgcaaaggacaagcagagttcacagagctcaggatagaaacatcagagcctcctccacgggcttcagtgaaactccgatgaactgtacctgagggaattttttcttaatcaaccccttgtgtggatgaatacaggaacaacaaaacttgtgtacgtatgaaagtcatgttgttaagcagttatgatttaagaggttttaagtcagagggatcatctggaggccggctttgtgcaagcttttacagccttctgcagtgtccttaccctggctgtacatggggaagggctatgtgtaaacaagtgctttagaggcctctgagagtttttaaaaatcagacccattaacaaaagagagggtttcttaggaacaaagcaactattttgattactgagatctctgttttgtttctgtgagttactctgtattcctttccccatttcactcttgcccttcacatcttaaatgtccataagaaacccttgcatgtgttggtattctgaggcatcccgtgggaaagtcccctaagtcccattttgtacttcaacaaaaaatgactgtagcagaagataagtggagacttttatggatatactactcattttacttaaaatctacccagttcagacttgaatgtaaacttgtattaggggaaaattctccaaagagggttttctacatacacagaagcagttcaacttctcaagttaattttgataagcagaatctactactggccagagcgacaggagtggctaggggttgccagccagtccctttctgatgatcaaggccctgcacagcaggatgccacaggatgcccctgccatctagctggaagcatcaaaagtccctctgtatgacccggtgtgggaaagagggttgtcaggatgagaaagtggggctgcagggtgacgataagaccacctaaccaactccccacctccaccaccacaataagaacaaaactgtagggctctaaagagagggggtggtttacaagtttattgagcatttactaggaagtgacatggcgatgacctctgtacatgagttaggttcactttcatgtggcctcccactacagagatgcgtatgcccagaagtcagctctctgaggagacaggctactttggccccagtttgaagcattctgtccaaatgtcctgagctctccagcagtcaagtagtgaatggataccatacttattatggttgatgaaaaaaggcagagcttatcctcaattttttttagggaagagaaggaataaaataaaagtggttcaagctgggcatggtggctcacacctgtaattgcagcactttgggaggctgaggcaggcagatcacttgaggtcaggagttcaagaccagcctggccaacagggtgaaaccccatctctactaaaaatacaaaaattacccaggcgtgatggtgggcgcctgtaatcccagctacacaggaagctgaggcaggaaaattgcttgaaccggggaggcggagattgcagtgagccaagattgtgccacttcattccagcctgggcgacagagcgaaactctgtcaaaggaaaggaaagaaaagaaaaaaaaaaagagagagagaaaagaa

SEQ ID NO: 1047 - DNA, 795 bp, Homo sapiens
gcacaatgatgttcagcatcactggggattattgaaaggttgaagtttttaggtttaccttcatagcccactcaaatgataggtcagtgtttcctaaacgattcttcagattactcatgaccccacaggtgggaccagaaggcctttgaaaagacccttggcaagtagggtctcgagtcagtcgactttgggaaatgcctgtcttgttgatgcatagtacattattagtgtatcaaagatgttgaaaagccttggggaaacctagtgtttctcaggcttacttggccatggaacctattttctttggaatatcttacaggacactactgtttgccaaacccaatttgggcaatgctggtttaggtttaggttaatctggatgttctgtaatgaaaccacattatagatagacacaggaaaattggctagtaggtcttgtgtcccctcggaatccattctgtcttcttgctgtaaaagctgagacttgatgcccaacagcagcctcatctagagcatcctgcctttgtaagcctgctgaattgtgattcacagttccctgggtgaggggtggtgataaagcatttaaagaggactgataataactaggaatacttatgctaggaagtgccagaagactttcagagcaatttgtctttaagccaggtgtagtggcccacacctgtaatctcagcactctgggaggctgaggcaggagaatcacttgagcccaggagttcaagaccagcctgggcaatatagtgagacccctatctcttaaaaaataaaaaaggaaag

SEQ ID NO: 1048 - DNA, 2755 bp, Homo sapiens
cactggaaggtctacgttatagccagaggggtccagcctttggtcatctgcgatggaaccgctttctcagaactgtaggaaatagaactgtgcacaggaacagcttccagagccgaaaaccaggttgaaaggggaaaaataaaaacaaaaacgatgaaactgctttctgggggttggttacttagttacctgccctttgcatgcatgtgtgaaccagctgtgagctgcaaggcagtggccagagcctcgccctcctgactcttcctgcaggtggctcaggaaggattcagcctggccacttggctaggactctgccagcacccatctgagactgacctcttccgggcctttggacactatgaccttgatgctgcccttcaggcaggaaacagggctggtgcctttcttcacctgcatggccagcttccttccctggcagtggagagggcagccaacaggttctaatgtcagagccatcctttaccaggtgggcctgcttgtccctgtcttgcctgccacatcactctactttttggaaggccatggctgattaaagaagttcttgtagtttcccaagcaaagtggaatctagaaacagtgaaaaaagttcagataactttgaattgcattcaagaagtacacttctttcccattgtccgtggctcttggagtctccgtgatgccaggctagagtctgattatataataattcaaaatggtaactcccaaggtaatgctttcttccatttcatcaggttcttttatccccactgcaccccctccccttctcccttgcctatctggatggcttctcagaagctcggccctagtcctccctgccttggcggggccagagcccactactgctgaggcagcactgctctcgtcagctgtgttgcctttaccaagtgtcttcagagggttatgagttagagtagctggcctggggagagggtgcctccctgggtttgatctttagggtctgactttctgcagagaagatgttttacagatgtgtcaaagctgatgtaatgtggttgggggaggaaatccagacccaaagtgtttgtcagctgggtgtacaactgcctatgtgatcctctgtcttaaaatgatttctgtctgtgctgcgaaacaaagacaaggtgaggtgtttttcttttttgtaataatataaagctgtgtgtttctgattggatgattcactatgtgcattgttttctcctaagtgcttttagtaggtagcaatcaaatggtgtaaataaggatgttcttttcctgttccttttatttttttctctctttattattcttttattgacaccactagatagctggccactggtcatgccattgccaagatgaagaaaaagcaaactacactttggcctctggttctgaattgcagaaatcaaaggatgcagtaggtgtctatgtcagaattatggatcagaggcagacaatgacgagtgaagatggttgtgaagccctcttcattcctggaggagcctgcatctcatctctcaggccctctttctctgtgggtctcatgaacagcagtggggaccattgagcacttgaatggcctgtttgtctatgggcttgcaaaggacaagcagagttcacagagctcaggatagaaacatcagagcctcctccacgggcttcagtgaaactccgatgaactgtacctgagggaattttttcttaatcaaccccttgtgtggatgaatacaggaacaacaaaacttgtgtacgtatgaaagtcatgttgttaagcagttatgatttaagaggttttaagtcagagggatcatctggaggccggctttgtgcaagcttttacagccttctgcagtgtccttaccctggctgtacatggggaagggctatgtgtaaacaagtgctttagaggcctctgagagtttttaaaaatcagacccattaacaaaagagagggtttcttaggaacaaagcaactattttgattactgagatctctgttttgtttctgtgagttactctgtattcctttccccatttcactcttgcccttcacatcttaaatgtccataagaaacccttgcatgtgttggtattctgaggcatcccgtgggaaagtcccctaagtcccattttgtacttcaacaaaaaatgactgtagcagaagataagtggagacttttatggatatactactcattttacttaaaatctacccagttcagacttgaatgtaaacttgtattaggggaaaattctccaaagagggttttctacatacacagaagcagttcaacttctcaagttaattttgataagcagaatctactactggccagagcgacaggagtggctaggggttgccagccagtccctttctgatgatcaaggccctgcacagcaggatgccacaggatgcccctgccatctagctggaagcatcaaaagtccctctgtatgacccggtgtgggaaagaaggttgtcaggatgagaaagtggggctgcagggtgacgataagaccacctaaccaactccccacctccaccaccacaataagaacaaaactgtagggctctaaagagagggggtggtttacaagtttattgagcatttactaggaagtgacatggcgatgacctctgtacatgagttaggttcacttttatgtgggctctcactatacagatacgtatgcccataagtcagctctgatgaggacacaggctactttggccccatttagacacatt

SEQ ID NO: 1049 - DNA, 158 bp, Homo sapiens
ggcatggtggtgtgcacctgtaatcccagctactcgggaggctgaggcaggagaattgcttgaacctgggaggtggaggttgcagtgagccgagattgcgccattgcactccagcttgggcaacaagagtgaaactccgtctcaaaaaaaaaaagaaa

SEQ ID NO: 1050 - DNA, 214 bp, Homo sapiens
ctccatctcaaaaaaaaaaaattaagtaaataagtaaataaataaataaaagcaataataataataataataaaagaggcagaactcagccttgagccagggctcctgcccctctgcgctatcctaggtgatgatcttcagtttaggggtggaggaagagataagcatagagggagggaagctgctccacactgaccaggactgggagaagcat

SEQ ID NO: 1051 - DNA, 215 bp, Homo sapiens
ctccatctcaaaaaaaaaaaaattaagtaaataagtaaataaataaataaaagcaataataataataataataaaagaggcagaactcagccttgagccagggctcctgcccctctgcgctatcctaggtgatgatcttcagtttaggggtggaggaagagataagcatagagggagggaagctgctccacactgaccaggactgggagaagcat

SEQ ID NO: 1052 - DNA, 84 bp, Homo sapiens
taatcccagcactttgggaggccgaggcgggcagatcacctgaggtcaggagtttgagaccaacctggccaacatggtgaaacc

SEQ ID NO: 1053 - DNA, 84 bp, Homo sapiens; identical to SEQ ID NO: 1052

SEQ ID NO: 1054 - DNA, 14654 bp, Homo sapiens
ggaagtgcggcggccgggcgcgcggggtgggcggcgagcggagccggccggagcgggccgggcagcggccgccgccgtcccggggcggacgggcgcgggcgggaggatggagctgaactccctgctgatcctgctggaggcggccgagtacctggagcgcagggatcgaggtagcgctcgcaccccattgtgcgcccgcggcggtgggcgggcggcggggcgtgccgggcgggggccgctgaccgcgccgtgtgtccgcagaggccgagcacggctacgcctcggtgctgcccttcgacggcgacttcgccagggagaaaacaaaggcggccggcctggtgcgcaaggccccgaacaacaggtaccgccccccgctcccgaccccgcccggcccggtccgaacccccgccgccgcccggagcgtgctctccgggccccgattcccggcccgcggccctcagcgccgccgccgcgcgccccggcggccagcctggaggaggaggcgcgcaggccgcggccgcagccccgcccggccggccccgccctcgccgtcgccatcttcccgcggccgcgcctcccgggccgctcgcgtaaacagtgccacgcgtacagcgcccgccgccggggtccgctcccgcgcccgctccccgcccccgagttgttctggacttttccaggcggtagaaaagttgtcagcgggcgctggccggtgccccgtgggtctggggaaacaggctcagccagggtctgcgggggctgccggccctaaccccttctctccgcgggtgggtgggcggcctcctttcgactggctctgccagccgaactctgctgctcggccaccttcccccgcccccaggagcctagacagagaagcgagtggaggcgctgtcctgggccctcactcctcccagggtgcccaccgcttctgcccagcctcctgacacagcgaaactccagccaccagtatgggggtcctcttttttaagacagaggccttttaagggggcgggaggagggggcaggctgcagggcaggggccccatgaagtcgttactacgggtgccagctgcgccctccataccttgacctcgtgttcaggcagcagaagccctgaagctggggtgcgtacaggtcccccgcgtggggagtggggaccctgggccggggctccccggggatttccaccctcctggctgctgtgaggaccatagcacacctggtcctgtctgggcccaccttggcccagcccttttgtgtgagcaggctgggagctgcgtttgtagggggcttcagagccccagggcatggctcattcctgtggtccacctgttctagggaatccgaaaggctggtgtagggacccatttctgtggcatcctgagccaggcgaggaattggttgagtctccagctgccctggctgggacccgtccctgagtcccagcccctggtcccctactggggacagtttggggaaggacaggagtgtgacgagggaaccattgcctcaggcctcctcagtgagcaagcccggcccccgctgccgcttctctccaaaccaagtccctgacccgtggagaactctggggcgtgagctggggctcccccagcatggagaatccaaagctgacaaccagcgtcctggccaaggctgcccgaacactgcctctatgctgagcgtttcacacatgcagccagttcatcttcaccccaggctcagagaggtgatgtgatttttatctctatggccaaggaaactgaggcaaggagaggtttggttacttgcctgccactcacccatctctgatgacgcctgttcctgagatggggtcccagctgtccacattctgctgggacagagaccatgggggcactggtgagggagacagagggctccccaactctggtgcatctcccctggctcctctgggccgagccccgctcccccggggcctgaggcagcccagggctggcggcttggccccttcctcgggtgggcagcactgccctggaggtttcctcagccagcccagacaagtagctgggcggagcagggggccagaggatctctgagcccctgacttgtccccacctgtgaggcttccatgctctgccaaggtgagggaggggacatggcacagtgaggctggggcaagggtagggagtggggccggaggacagtgtcagggttgagggaggcggcagagcactggggccagcctgcaggggggtccattctgtgggaagtgtgcttgtctcctggggtcacgggaatgctgggaacgcacttggcctggcctcagcggggacaggtcccacctctcctgagggatagagtgctcctgggacccatgttgcaaacatccccctcgatggaccccaagggtctctgggcccaggaggagctgcaagaggggccctggctgctggaggagggccccctgcctccagggtggggtccagccccgtgccacccttcaaggggtaggcaggtaggcttttatgttgaagggcacctgctgaccccgacctccctcttgactacagacccacgtggccaggctgcagtttgggctgaggacagagagtacggctcattcctgcggcctgcctattctggggaagcagaaacgctggcgtaggggcctatctctgtgaggccagtgaggagcatatggctgtggcctctgctggccctggtcggccctggctggccctggcagtgattcggaggctccttgtccagcccatgtgaccaacaggccctcccggaccctgagacctgggtctggaggctctgctgaggctacacaaggaggcccagggcctgttggtgcagcgggtgggaggggcaggcccttggcctgagtggttgggacaggagacgccagatcccaagttcctgaagcaggcagtggtcagcaagaagcttcaggaaggagccaggtcctgagggcagggagaggcctcagggctgggtctggaggtgccccgaggcagtctgagctctctgcccacctgtgcagcggcatcctgggaggcccgggagccctggctggcctgtggggtcctgcctggacacggaaggtggcctggagctgggagcgaggtccccctgcctcgttatcctccaggcagatgctgtggcacaccctgtggtgctgggaattgtgtgcccgcgtctgaatgggcaagacaggtgagcagcaggtggggccactgtccccagagaagctgagcccgggcctccagggcagcccatcctgctagcacagcccctgagggaagtgggagggctggcctcagtgtccccctgtgcctactggcctgggaagcatccacatctcagaagccccctcatgggctgacctggctgacgctgctgtgtccctggtccccattggtaaggtgggctgtggtcacgcaggtgtgtgagcccgagagagtggtggtgtcaggacaggaccacctgtgtcctgagggcctggtctctgggctccatctccacctgctgtttgtcccgggtgctaggctgctttggctccaaggacacagctggcctcagggattggggagcagggaaggcaggtggctggtgggggtcagcgccaggacctgttgctgctccctgggcctcccccatccctctggaagggggcctaggtcctcctgtcagccagattcaccacgggccttgctaggtgggctggtggccctgggcgccctggacctgcctgcagctctgggcctccctgtaagcaaggctggcccctgctgctgcttctcaccaaaccaagtccctgacccatggagaactccagggcgtgagctgcggctcccccggcacggagtacccaaagctgacaaccagcgcccacccttagcatgtggttccccccaccctgggtgggcaactgctcacctgccccaggcctcactgctctgggccattccaggacccagacacagccagccactgtctgcaggtcctggccccctaggagagcactgctctctgtgccctggtgggcaggcagaagagtgagctctgtctttctgtctttctaaacaggtcttcacacaacgagctagaaaagcacaggtaagtgaccccccagttccccacatgagcccgacacctggcccacccttttactgagggtgtgtggtgcgttgagcctgcccctgtcccgggcacggccagccgtgctgccaggctgtgtccttgtcttgggaatggtcagacttggaggagaaggctgaggtctgtttcaggcactctgtgctagaggcaggagatggcaggaggcccaggccctgctttccagagctcatccaggtgggggtgagagatgtggagcagggccccttgtgctgtgtgacagtcagggcccttggctttcaggacagtggtctccaatcaggagggttcggctctctgccctgtgcatcctggggtctgccttccaagaagccgtgctagagtcttgtccgaggggcagatggagggcagccagtccctggccgcctgggaagctccagcctagggcaggattcaggcgagctcttgagtaaagctgcggggtgttcattcctcctggtgacagccggaggcagctagggctgcaggctcagctctgctggtggggatgaggtgcaggtgagctcaggggcctaggggctggcagcgggagccctgggtgagtgcagaggcagccctagaggcaggagcccccatgccaggaccaggaagagtcccctgagggatgctggtccttcgctctctcctgacttgtgatcctgtctgtgaaatgggtcagctctgtcctcccttcctagtggggcaggtctgcgtgctgcttgagccccccacagtcccctccagaaagatttggtgctcggccagttctccgcctccccaccatgtctacccccacagcagcaccaacttccgttctcccgggattcaggccgctggctggggcgggcagctgggcagggacagaacgcagtgttctctgaggaactgcacttcctggacaggtcatgtgtgtttcggggggttccctagaggccacagaggtgggggcaggtacagggcccaagagaaccaggcaggcctggaattgttccaggcctaagaagaccagcctagccttgaccaggacccaggagccggggcaggcacgtgggggtgttcagggaaggcttcctggaggcggtccctgggaggacagccccccaatggggacagattaaggggcagtgacattgggggagggtgggtggcaagggcgtggcagcccttggggaggacaggggacccctgcagctgccctttgacctggctttgccctctgtcctctcctcccagaggctgcatttagccagggcctcatggggccttcttgagacacagaggaggggtgtgtgggcagccagggtgtctctgtggactcccccaccccagtgcagggggtctctgtctctggctggccaagaggcggatgtggacagccccaagcacctacaggcctggagcttggggccctggatcacagcctacctgatgccagctgctcttggctgcaggaagggctgcgtgctgtcttgagaaaggaaggaagcccctggctgggccacccagccatccccgggaggcaggccctggacatcgctttgcccggagttgtccccttactggggactgggcagggcctgtgggacttcccctgtgggtgctctgagccaagcctgcccagccctgctcctcatccctttgtagagaggcagctccagcaggtctgaggccgttgccaaccccagggtcctggggaccgtggaggcctcgccttcttggctgctgacctcactggccccactccaggctctgatcttagtgtgttttgggggaaggtcccagccttctttcctggcccttgacagccgctgaatggcaggacccatcccaaaggccagtccagagtcttcagctgagtctctgccccacattcccccaggcacgtccaggaggtccccaggagccccctgcagcccagcctcatgtgctggtgcagcctcacacggctttcacatacctcgggaagttctgttggcaacatctagaaaacgcaggcagagggagtgggaggcacgcttgctcctgggccacccccagctccccggcagcggcagccaggctctctggttggctgggatgctggcgtggagccatgccctctcggtgccctgggtccccctctgggcatgggggtttttgggggagctgggaagtgctgcgtcagaggtggggctgctgtcgataccagcccagcgtgctagtcctgcaggcgggttctgcctcctgaatccacacagggttccttcaggaagtggaggttttaaaagccctttggatgcccagggacagccgtggggtgctggcagggggcccagggcactgcagcggcttcaggaggggagggctcagcaggagcccagtgcagccccgggctgaggggcttcatggctcagaggggtgggtggggatcttcctggggtcccgcaaccagccactgtagagttggctccaggccactgctgctctccagggcaggaatttctgtgcctccagccctggcgcccacactcttgggccaggtggacctgttactgggttttggacagtgcgtgtgtgtggtcagatggcttctgtttgtctctcgagaaaggtgttccgtgatttctaaagcggtctgttcacggacctcccctgcaccccaccccagagaccgcatcccaggcactcagaggctgagccacatcctccactgctccccgcgggcactaacattgccgatgagacttggataaggaggggaccttgttctccatttcctcacttgatctttcacccgacaccacgtacgtaagtcctgtccgcctgcgtcagggcacactcctccaccttctcatccctgatgactgcacaggacacttggctgtgccaccagcgttctttgtgatgaccctctggtttacacagggacttccggacagtcctgcgatgtgccttggtgagcgcagacctttgtggatctggggggatagttttgtaggaccaaggccctagaagtagagatgctggttggcggtcagtgataactgtatcgatggcccttcagacctgtgtccccttttgctctcccaccagcaaaccatcaacgacccctcgaagtggctggcgcaggagccatcccttctcatgtcagcctgtcggagggtgcaagttgtacctccttgtttgtgtgtgcatttcctggctcgggtgagatggagccgggcgttaggttaggttggccctcgtgtcctgcagcctgtttgtgtccttcgcccgttgtgacatcgaggcattctgcttttaatttttgatgtgtatgagctcaaaataccacaaatactaaccatttgtcttttatatgtattgcaaagatttttctacttgttctttgtctctcagctgtgtttttctttcttgtgcaaacgtgtctttctctgattgtcacagcaatgtctgtgtgtgtttttttttaagcgtagaaaacctggaaaatacagaaaagcacaaagctaaagaaataaaattgccgggtgcttcgcctggagacgcacgctccctgtgccttgtttgattctgtcgtctcttgtgtgcgtctgctcttttattttttaaacaaaattgggtcacttgtcacctatgtggttccgtattctaatttttcacttaacattcatgatgtgcatatgtaacacactaaaatgataatgaggttgttttggggtggtggaattcgggggtacttttaatttttttttattttttttcctttttgttgatttgcatttttaaattgttctacagaggtcatatagtgctgatgtaattacatggtgggatggaaagccatttgctagagtggaccagggaaggagacccctggcaacgtccccacttgcaaacctcgtcccagtggtggctgcagtacagtggcgacgcgccttgggaaaggacccctccctgagcagagagagcacgctttggcctcttgcctacacagttcctggggtggggggcggcagggcgctcactcctgttggcggtggggaggctgagcttccaggcactggggtagtcacagagcggcagcctgggacccctttccctgcacctgtgcatgggagacagcgtgggagacgttgaggatcttggccctgttcaggccacctccaggcagacctcccgactggtggggctgttaccgctgcacccagcagccccctccttcttcaggctcctcctctgtccagaggaaatggctgtccctgccgacgttactcccagggggacaagatttgctgggcttgggaacggcaggagcagacatgccaaggctggggtgctcagtgttggcaccacgtggggaaagtcacgtgtgtaggcatcagctgtggcagggcagttgggcggcaggttttcaaaagacaaaaaatattcctgccccttcacctggtcattccactcgtaaggatttacccaaatcaaagtgtcctatatttggaagcagcctctgcggcctgcacgggatgggtgagtccgtggttgaacatggcagtgacaaaacctccgggtgccctgcactgccaggcaggtgcacgtgggcctggccagggtcccaggccgagttgatgcctctgggtgagctgggctccccgcaccccgtgagctccaccagcctcccccgcagacaagcaggccagcagggaaggcggtgtttccacaggggcaggcctaggatgaagccagggcccctctcctgaggtgcccgatgaatgtgtcctggaggattgtggcatgtgagcaagtacccttgagtgtgaacaagcaagcaagcaccactggatgtcatggctccagttttgtggaaagtggattcatctgtggatacggggacagaatctggaatgaggcagtttccaaagggatatgaaacttgggttggaagggcctggtccctggccctcccttgacctaggctgatcatgtttccatggtcacaaaagtgacagagagcacgttgtgcacgatgaggtagagagacgtgaatcttgtctgggtccttccagatctcggtgcagcctgaaaggcaccctcgcctcaccccacccctccctgcatgtggactccagggtggggatgggggatgggggatggcaggggggcgagctggggctcctaggaaatgcctggcggtgacgcgctgaggctttgcaggccatggtgagctgggcgcttctgccaggtgtctgggggctgtgggtgttgggctcctcctgggggtgggggacgggggttcccaaccaggccaggaggggatccttagagagggaccctcagcacatgtgcagcagtggatggtgggggtgggtctgtgcagggccctggaaactgcctgctgccctcccccaccccagcctgatggttctgtctctggctctttcagacgagccaaactcaggctgtaccttgagcagctcaagcaactggtgcccctgggccccgacagcacccgccacaccacgctgagcctcctgaagcgggccaaggtgcacatcaaggtgagtgggccttgctctccaccctgccctgtctggctgcctcagtgtccctgcacgccctgggggggtgctcacaggtgaccctgggcagcccttggatcagagggcctgaagatgggtggggagccatctggcgggtgtgtgtcgggggcctggtgggttttgccagggtggaggagcagcaacaggagctgccaaggggtcgaggctgttccgtggcttgtgtcgggtttgttgggtgctgatggcataagaagccgcatcgcagcatagactgggatggagaggaggaggtcgggggacagattgctctctggggtcctgggctgtgaagaggcagctgctggaaggagagagggggccagggtttcctgggtgccatcagaaggcagactaaaagtaggcagcctgatgggggtgccagggtggggttggggcagcgggagctggcagtgggtctgggctcagggagacattccctgggaccgccccccaaaggacttttgacagccctgttggtttgggggccttgtgacatttggaccaaccagggcaaatctctatctgctctgagggcctcttctgcctgcataggcatggtcaccttcaggctggggtgtcaggagctttgagaggggcacaaccagagccctgggggccctcacagagcaagcagtgtctcagtggggcccacaggaaggtttagagagggcagggcacaggtgttgcagggacaggcatggcataggccacagcccgatgggggcgggcagggctgggagtgtgtgaggagacccgctgtaagcaggactgtcctggagacggtgccagccaaagattgggtagcactgacccgctgccacacatggctcaacttggccaaggctgcctggtggctgcgggtattagagctgggccgtagacagaaaccacagggctgggaggtggcatctgactgtgaccgcctggctggggcagggagggacccacctcaggctgtggggctggcagagactgggcaccctgtggcctgtagccttggctaggtcttggcagggatggggaacctcccgggcccaggcctgggtgccccagtgcctggccagggggatggggggactcctcttcccgctgtgagctcacagcccccctcgaccccagaaactggaggagcaggaccgccgggcactgagcatcaaggagcagctgcagcaggagcatcgtttcctgaagcggcgcctggagcagctgtcggtgcagagcgtggagcgcgtgcgcacagatagcacgggctctgctgtctccacggacgactcagagcaaggtggggcgtggggcgcggggcagcctcacctgggcctccgggtgcgcagtggtgcagctccctgggtggagaggaggtgcctggtgctggggctggggagaaccctcccagctccctgctgcactggggtgtgtgtttgtcactaagcgcagaagggactggacagggagggtgggatgcagaggctgtgtggcccgctgaggactggtgcttctgaggccgggttctcagccagagccctcctggcgtctgctgccccagggcccagacagcgccctccgcacttctgcccctctgcctagagcttctgcttccagaaaagggagaaatgggctggcaccctcagagtggcctgaccccatccccactctattctccctagaagtggacatagagggcatggagtttggccctggtgagctggacagtgttggcagcagcagtgacgcggacgaccactacagcctgcagagtggcaccggcggcgacagtggcttcgggccccactgccggcggctgggccgccccgccctctcgtaggcccgtgccctctgctccttggcctgcctgcccgccagccacgcgtgtcagccctccagttctccttcagttgacgccagcctctccacaggcccactgctgtgccattctggaagctccagctgctgctgggctgcctggcactgcccgcttgccggtcagggcctgccgagctgcctgccccttccagctgggcagagtcccctgcaaggaggcagggcccagcttccacatccggagccctggtcagcatagccgcccacggtctgttctcagattcctaatcattccagaagtattaaacgtcattgctgcaaacctcggcaggtgccgtgtgaggggcttaatgaccaccacagggagctcagaccccaaccctggatcccaggagaaaggagtggaccgaggaaggaaggaaggcaaggctgtctgtccatccgtccgtctgtccacctacctgtcagtccacataggctcctggcgtggacaaggggtctgtgaagggcgggaactgggtgagcacctggggcaggtgggtggttaaggtccttcccacttcgcaggtgtcagaacctagggctgggctctcggggccaggcaggccagcccagcccacgccgagctgggcagcgtctgctctggtaggactgtcagacgcacacgcgcacgcacctagacacacccactcatgtacatgctcacacatgcagacacacctgggcgtcccgaggtcacatgttctggggatgatggccttcaggggtcatctggcaaacagcccctgggctgtgcctggatccccctctagctcctgctcacccacgcccacccagtagtcctgcctgtctgcacaggagaggggcttctcttcctggctggggctggggtgaactggaggctggttaagttgcagccgctgggtcctcgggggcttactcatctcccttttttaaacaaaaagcaaaaaagtaaaatgctgcactgcccagcagcccggttagggctcctggagccaccttaggaaagggcttctcatgagctctgctgcggcagcttcagctggcagagaggctttcccagaaaaaaaaaaaaaaccatttttaaaaagaagaaagcctaaagactctcggcctagggacgtccgtgtgtgccgcctctgtttcctgtaccagatttttgtattctattttcctagctgttgttgcgtccttgtttgctgaggggtgggagccacccagcgtctcagggacctgtccctccgtcacgtcgtcaaagtgtgccttgtgtcttgtgtcaggccttgcccttcccaccagcatgtccctcgtggctcagggtgccccaggcctgcccagctagtgctgtcctcccatctcctgtgggcagcccctcccggcagccagggcttcctggaggcgatgcagccaggcccctgtgggtggcacggaggggctgtgacctggtccccagtgttgccctccccagtggctggcaggggcctgcttgctcactagagagatggattctcacctgtcacctgactcgagccccctgcttcctggcctaggcgagggttccaggtttcagacactggcagccaatgaagactgtgctcgctgggtggtgcaggcctggcaccaggaggcttgcacccgcctttccttcctgacgtcctctgtccttggggctggcccatagcagtgcctgccgtgcctctggtacatctgtagccaattcccatatcatggggaaaattcgtgtctattttcagtcgtacgcatagacgccccaggatggggggcccactgtggcggaagggggtccctggaaacaactctggcacagaacctgccctgcaggctgtagggggcatggtgcctggagctgaggggcatccgaacgcgttgcgggtggttgtgaggaggcctgtctgcatctccttccggccccactggggtccaggggtgcccagaaaggagcttcccctgcctgcctgagtctgtccccccaggcttcatttcaaacaccgtggcacctccgagcaaggcgggccgtgtgtaaaagcttgcttccccagccagcactgcagggccctgaggtggtcgtgtccctgccctcaattcttgaagcaccagctccctgccccaccctccagtgcctgaggcagctaggggcttctgctctcatctctgaccagcagaatccacccggtgaccagtggtggcccctcagcccaccctcccggcagctcagcctgtggctcttgaggccgtggttcccacgtggactgggaggcagtctcagccacccggggtgctgttcagctgcccctccctgccatcagcaggtgggtgaggggttgcccactgggtgggggcccgtgctaggagtcaccacatgctccaacctcccactgctccctgtcaggggcccaggctgccatcactggaggctgcagggaccaagaggccatcaccgtgtctatagagagcagacagaagcagaacagagcccggggctcctgagcctctgcgtgtgccctcccagcccacaccagtgctctcggccactgagcacccagactcaggcttgggttccccagccttattggaaggcagctcccgcataccaggataacccccgcaaaccacatagcagacccccgccatcctcgcagagtgggagaggctgcagcaaggctttgcctctgcagaccccatcttagtggcacggtgcttgggcctgtgtccccgggtggtggaaccctgtaccggtctgtggccctagggtccctgctctgtctgccccggcccgtgctgtccgctgggtgaggcaggctcccccgtgccctgcctccctctgtcagggaacctgggaccccctccccactgcctgcacagaggaccctgaccctcggccagcagggtggccccaggtccatgttgggcactagggcaggttccgtgccagagtcgggggccacacgagggcctggtgccggtgaggggggcgtgcgctagagggggaaaggggcccccggccacctgtccaccgtgtgggccgtgctgtgtccttatgtcattgtaatataaatacagatttttatatctcac

SEQ ID NO: 1055 - DNA, 566 bp, Homo sapiens
ccagaactacctgggcacggcttctgcttcctgtcatggggacctgccgtgctgaggtgaagcgagatggtgtagccagctgtccccttgtgctggtggtgaccacggagacacaggctcctgtcgtgcccatcacggggtggttgtgaggcgatgagacttcacgcagtggggagaagaggccttgttctcacccaagcaagccaggctggctgcccgctcccccacagggaggccttttggagggaacccccttggaagcagagacctctgatctgccgagggccggggttggtgggggtgtgggcccagctaccctggtgcacagggaggagtcctgggggccccagcagtgggcagctgagagaggacatgcctgccttgagtgctggagaattgatggagctgggtggtcatacggggggtcctgagtgtgaggtcgccacactgtgcacacggcagctatgcactggaggtggcccagtgggacccgccagcaggttgtggggtggccatggagggtaactgctgggggcctcagggaggaatctgagctcccctaaccc

SEQ ID NO: 1056 - DNA, 553 bp, Homo sapiens
  SITE (551): n equals a,t,g, or c
tatgggctactttatttggccttatggccatataagaagcataaatgtattggccattactctaatggcctataacttgtcaggatatgtttaagctttgataaagtttgtttttctttagttctccaagggacttagttggattttgtctttaatcttgcagcatccacaaatccagaagaaatctcaatatatcaaatacctttgttgtgatgatgtgaggacactgcatcagtgggtcaatgggatccgcattgcaaaggcatgtctccttttgatttgatgatggaataatgaggtgtttgtcgatgatatagttttcgttttcatgacaactattctgactatttcatgttcatggatttgccagtgcctacgtttttcaggcctaagtttcaagttttaaatgttgtcttttttccttgtttatagggataaacttttaacatttggtatacttggaataatattgctggtaaaagcttgtgtagtatcaaagtgatttattttggctttggagaatgcattatatgattcttaaatagtagagntt

SEQ ID NO: 1057 - DNA, 15366 bp, Homo sapiens
cttggttgaaaatcttcttaattggacaagagatagccaaaacaagcttatatttatggagcgtatagaaaaatatgcacttttcaaaaacccacaggtaagaccaaacaacttacagaggtcaggatttgtaaatatgtctcctattttattcgattactgctaagttagagttaaaagactggtaaacacctggttggagcgatatacctgcaaaatcctataggagcatcatctactactgctgctgctgctgctgctgaggtggaaagtcagctggtgcccacgtgttaggccctaaagaggttcccagtcctccagaaccagatggggtgagccgttttggaagcagaagtatagctctagtgagttaccaggtcttttggctctgtaatccagagctgtgttgaacccagctgtttatttggtgagtttgtcatctcatcaaagaaaagtacttctctactccagccatttatccagttgacacttcttttggaattactttttaaacatcccagtaaccttgattacaaatggctttacattctaataaacatactttgatttatttgacatctttccttattccaaaataatgtttgagttaatacttcccaatacctagacattttacaaaattcagtaggtgagggaaaacaactccacaataaaaagtagtaatgaagaaaaatagcagcagtgttaaagatattgcatagttatgcttcaaatggcataaccatgacacatcttttctggatgttttagtgaagaatacatatttgggggtatcaacagatctttttgtaggcagttatgaaaaataattacaggccaggcgcaatggctcactcctgtaatcccagcactttgggaggctgaggtggactgatcacaaggtcaggagatcgagaccatcctggctaacacggtgaaaccccgtctctactaaaaatacaaaaaattagcccagcactttgggagtctgaggtggatggatcacagggtcaggagatcgagaccatcctggctaacacggtgaaaccctgtctctactaaaaatacaaaaaattagccgggcgtggtgtcgggcgcctgtagtcccagctacttgggaggctgaggcaggagaatggtgtgaatccgggagtcggagcttgcactgagccgagattgtgccactgcactccagcctgggtgacagtgagactccgtctccaaaaaaaaaaagagaaaaagaaaaagaagtacagtcagccctctatatccatgggttctgcatctgtggatttgcacaactgcagatctaaaatattcagaaaaataattccaggttctaaaaaacaaaacttgaatatgccacgcttgagtactgcattgaattcatgcaaattaaatgataggtaggcattgtattaggtattgtaagtaatctagagattatttaaagtacaagggagaatgtgcataggttatatgcaaatgtgaccccatttttataagtgactttaagcatcagcagattttggtatacaggggagatcctagaatcaatctcctatggacaacaagggatgactgtgtactaatgagtagacttcagtttgatttttttgtttgtttgttttttgtttttttttgagatggagtctcgctctgttgcccaggctggagtcagtggcgtgatcttggctcactgcaacctccgcctccaagcgattctcctacctcagcctcctgcatagctgggactacaggtgcgtgctgccacacctggctaattttgtatttttagtagagacggggtttcaccgtgttggtcaggctggtcttgaacttctgacctcgtgatccacccgccttggcctcccagagtgctgggattacaggtgtgagccactgcacccagccagaattcagatttttagttgagtcaagtaaatgagattattaataaatgagtcccagagaatatgggatttcttcttaaaaagccagaacataaattttctgcacctagatcagtatattttaaggaaatttgccttacttgttgtacttatgaatttctaaacctttcagatcctctaacgtagctttcattagatatcccaaaacatatttgccagctgttgaatgtaataccacctcacagtctgggtaaggacagtttatgacaagtggacaggcaaggaggagactggtgttaagcattttagtgatgatgcccatacacaggtaacttttcaaagtttattctactctataccaacagaaatcagagttgctatttctctagaagaaaacatacacacacctgtgccaagggaataacagaatggatttatgctttaaccttctttttttctctcccacccatcccttccatatgtttgtttttccagaattatcttttggggaaaaaagaaacagctgagatggcagatagaaacaaagaagtcctcttggaggtatgacaacccccattttcctgcacatttaaaaattaaaatattaggccaggcatggtggctcacgcctgcaatcccaacacttcgggaggctgaggtgagtgaatcacaagatcaggagttcaagaccagcctgcccaagatggtgaaaccctgtctgttaaaaaataaaaaaattagccaggcgtggtggtgggcgcctgtaatcccagctactcgggaggctgaggcagggaattgcttgaacccgggatgcggaggttgcagcgagccgagattgcaccactgcattccagcctagcaacagggtgagactctgtctcaataaaataaataaataaataaataaataaaataaaatattaaatacctttttgaagtcaagtatgtcagtgttctatatttgtagttacaattttaattaaagaagcctgtgtattctttgatagtatgagggagagagttcaactgtgtgaacgtgttaggccactgaagaccctttattattttgccaagccatattctagtgatctaagaataatgagcttttaggggctgccaagtgggagaggtggctggtcaatgaaggatgtggttttgctgtttttatctgcttactcagagagaaatttgaatataattagctgttcacaaattatttccagccttatccttaaataattaaataatttttaaaatcatgatcattttttggaaaaatataattgaatttttggctgattttatagaactaaaatcaaataacttagtatacttgaaaacctgaataaacccttacttaccagcaaggcaattaggaagcgaagatcaacattcagttttcatagtgatactaactacggttaagtaaaaatctgccttgtaattcctaatttttctgtactttgaggagaaaaattaatttaggcccaaatgtcctatattagtgttttctgaggatttctcttttctttcacaaatacatgattgatttctttaatattagatttttatcaaagcatagtgtttagaacttagaattttgagtgtttatagtcctttcaacctagtattattttttaaataaatgccctctttgtcttagagtcacataaatggatagtttttaaattcttaaagtttaatcatacacttagcacgttgcattcttttaaaatatattcctgtttagtttgacagctaatctaaatgtagagaaaaaataaagtctaacgcttggtttgccctgacagttttattaaatttagtgtaactgtgctgtttgcaaaggtatttaactactgttacatgcaactcagttcatgtgtcaacttagtttttctccgaaacagtgttttagttaaaagtttgtaggtaaaaattcagtattacatgtatgactggcatttttatttaataaacattttaggattgccatagtagttccaaattcatattgtgtttagaatagaaagtgttttgtcttgtttttgtttttgtttttgtttttgtttttgttttgagacagagtctcgctctgttgcccaggctggagtgcagtggtgtgatctcagctcactgcaatctccgcctcccaggttcaagcaatttttgtgcctcagctgcccacataactgggactacaggctcgcgccaccatgcctggcttttttttttttttttaagtagagacgtggtttcactatgttggccaggctggtcttgaactcctgacctcaagtgatccacccgcttcccaaagtgctgggattacaggcatgagccactacacctggctggaaagttctaattgaggttaaattagcagcttggttttaatataaaaccattttggtttaataactgtcatgcatttcacaggagtaaacacaactttgttctgagaatccaacgatcataagtctttgcaaataatcttgttattttaggaatgtttttgtggaagttctgtaactgtaccagaaattgaaggagtcctttggttgaaggatgatggcaagaagtcctggaaaaagcgttattttctcttgcgagcatctggtatctactatgttcccaaaggaaaagcaaaggtgtgtcccttctgttggaatttgaacttcctcattatgctaattgcttttaatttgtattgagtatgctgacaaggtgaacccaggctatgatttgtttcagttcgtggaagacatagaatattgctttgtttattaatctattataaagaagaagaaacctgaaagttcttacttctctggtcactagttgagcctatctcagttctctttaccaaatttgaaatcatagttttatttgttgttttttggggactctttctggagtagttttgtttatttttgtttgggaagaacagcacagctctctgggattacaggcttttttatcttgtttgggtaatatgcttcttctgctaagggccaccctggtgtagctatcacttcggtgcttattggcaccaggactgttttaaacttttttacagtattatctcatctagtcttcacaatagtcctatgagcatatattgttgcccctatttaactggtgaaaacctccccccaaccagttgcgaatcactatactttacatatgcattataggcactgaacgacttgatattttcttgttctttccagagagctctattatacattattgtttttaatgtactagactatattaatagtatctttaaaatgccaacactccttaacaagttagtgttcattgtgaatgacaaaacagtaagtaaaatgggctgcttttttgttacgttaatgattaaagaagaaacatttatggagcatctcattgtctcgtgtaaatagcaataatttctatttagtattagcaaaagtagttttgattctcacctagaaaatgttaaccaggtatatttgcttgtttgtgcattattattaattttatctttttggtgtttttatcttaggtctctcgggatctggtgtgctttctccagctggatcatgtcaacgtttattatggccaggactatcggaacaaatacaaagcacctacagactattgtctggtgctgaaggtaaacacatatttctttttaggaattttaattgatgttagacatagagcaggttattggatattttagaactgttgagattccatcaattatactgtttttgctttattctcaaagtttaaaaaggaatggtgaagtgtggtaaggaaaagaagcatgtgctatatcatagcagaccctgggccaattatctctaggtaaggagtgaatattagattgtaagctttgagttgtgagatataaaatgtatttgattataaatttgagattctcatttaacaccaggcttattttaggaaaacttagaacagagccgaatgtaggtcataaatgtgctttagttcttttcctgtacttactcagcaaaccatcagagggcactgtgtccaagttcaaatcagactggctgttatctggtccagaaataatttttgtctctttttttccctgaactatagtcatgatagcccatgtatgtattgtgacctgagctgtttttagggaggtttttttttcttctttattcaagcttttgtacttcttgcaatgattatatctgtacttctgagaagaacggacattttaagcaaatttatagtgatctattagaacactgataaaaacgacatacaaaaattcaagaaaattagggagataatttttttttcattggctccatctttgtaatttcttggtaactacttaggtctacatgttcatatcatgtttaatttcacttttctctgagaattgtcactttagtttggggactgccattagtttgggagttttaggattttaggattttggagttttgattgctttgataaagtcagtacattgtagtagcaaccttttttttttttttttttttttttttttttgaggcagggtcttgctctgtcacccaggctggagtgcagtggcacaatcacagctcactgtagcctcgacttctcaggctccagcgatattcccagctcagtctcccaagtagctgggacttgaggtgcatgccaccacacccagctaatttttgtgtttttttgtagagacagggtttagccatattgcctaggctagtcacagattcctggcctcaagcaatctgcctgcctaggcttcccagagtgctaggattacaggcagagccactgctcctggccataatggtaaccttttattacataattgtgtttttggggaacaccactgtatcattttaggtacctttaggtgcaaatagttttttaaaagtcagtacaaagtagcttaattcagcagttttcaaaatgaggtccacagtctcctgagagtcagtccctaagaccatgatgtcaaaattatttaataatgctaagatgttatttgcctcttgaactttcattctctcacatatgtatagtggagttttctaagaggttatatgacatgtgatggtatcttcacgctagtgtaatgtgtgtttgtctatttatttatttatttatttttgagacagtctcactctgtctccctggctgatgtgatctcggctcactgcaacctctgcctcccgggttcaagtagttctcatgccttagcttcccgagtagctgggactacagccacatgccaccacacccagttaatttttgtatttttaggacagatgaggttttgccatgttggtcagactggcctcaagtgatccgcctgcctcagtctgctgaagtgctgggattataggcgtgagctactgtgcctggcctggcctgtgtattcttgtagtttaatttttttcttagttttaatttataatgtaagtattgctggggtggaaaaacttcacttcatactcttagggtcctagctgggcacacaaattaaattgacataagagatcaacaggagaaaagcataattacttgtatactggattggacaaagaataatttgtgaagaagcaactaaattatatgtgaagccttaaagatacgagttattttaacaaggtctgtacagaattctgttggtttcaacttctcatccctgaggagaaagatattttcgctttctagtattgagaaagcatcttttgcatggtaatttcatcttctaaggcttttaagaaatagcatgaaggtcagagtgatcttctgtacctgctgtttttcaagtgtcttttaacttagtcaatatgccagggtggtacatttttaactccttcaatatcagtagacataatccacgtaaaagaaagttattgggggactctcataacatgaaaacagtaaaagttggttggttatttcagtggctcaaggttgtcagtgagaactcaaattctttccatctttccttgttctacttcccgcatatcagcttattctcaggctgattcacctcacagtcccaagatggctgctgcagttctatgcatcacatgtagacccagaaaaatccagccagcagaagagggattattgctccctgtatttgtcttttataagaggaaggaactatttcacagaagttactcaaccaccctccttttgagagttactggcccagagtacattttctgctgacaagccaatcactgacaagggaataaaactactatggttggcttacaccagtcagaattcacaccctgtgggatataggtgagaggtaaggctctgccaggaaagaagtggggaggaggagatagccataggggcctgcactcaacctgtcagggtcattttaaaaatgaaatgttgacctttctttcttaataggtattcatctgttttgggagcaatttcattatatgttctctggactctcttaagaatctaaatgtggagcttctggtttttagcaatgaatgtttcctccagccttcctcttaaccctggtataattttaaaaatgacagcataatattgtggggaaaaaaggagcagaggtagcagattcaaaggggcacattttaataaggcagtagtatgaaatagtagttaaaagcatgcactctgggatgagattgcatgggttcaaattctagtactacctttcacttatcggaagcaattttgagcgctgttttaaccttactctgtgccttgctttcttcttggaacatggagataataatatgtaactcagagaggttttgtgagtatttaatgaaaaatgtgaagtatgtgaaatattttacatagtgtctagtacatagcaagggtgcaataaatgccacttttaataaaataatgtattagcagaacagacaatctgcagaagtacttgtacagagcctggatgaccataaggaaagtaatgaatgcctttattatgtgagaggatgaaaaaatgttttgaggttctaaaaggaattttaaactagcagtaatctgatacttgacttaaaaagactcatacttataccatagtactcttcaggttattatctgtattcccaggttagagagatgaggagaacagggtggaggataatttctctttgattttcccagatgttgttttgattaaaaaaaaaaaaaaaccctctttttgtgcagaacgcatggaagcacacatgcacacttgggcttctgctacagttgaacacctatgcagtcaagtttgcaaatcaccatgaagggagggcgtggtgatacagttgcgagccatctaaagcagcttgctgagatctctgaaccttgccctgcagcagtgcctccatgaagcagaacagtctcttaagccctcactggcaacactaacagagctcttttcagttggcctattttatcttctgcacaaactatggcttttgttttgctcatcactaaacctacctgaagcacctggcaaatagttctcaataagtatctgttgaatgaatgaatgaggtaaaatcccccttcctccttttatagaagaatacatacttctctgtctgccctcctttgctttttcaaggtcactattatggtttattataatgtaatttaccgtggacaaggagcatattccaagagagggcctatattatcaggagggaagactgttaggtattattttgctaacctcttattgttgagggtttattgtttaaaactgactataaccttcaacaagaaaattggttttggtattaaatgttataggagctgagctctgaaaagcaaagaatagaattaatgggtttcttttttttttccctcattgtagaccagagtgattgatctttaacaatgcagatacataacttatgttggtggccatctattcttgatggattgaaaacttatttaaattgcttattttattgagctcatggattttcacaacaaatgactatgattggggaattttggaaaactaaattcttttaaagctttttttctttctttctttgtttttttttttttttggagacgaagtctcgctctgttacccaggctggagtgcggtggcacgatcttggctcactgcaacctctgcctcctgggtttaagcgattctcctgtgtcagcctcctgagtagctgggattacaggcatgcaccaccacgtccaactaatttttgtatttttaatagagacggggtttcaccgtgttggtcaggttggtctcgaactcctgactccttgatccacccgcctcggcctcccaaagtgctgggtttacaggcatgagccaccatatctggcctttttctttcttataactgaacacaaatttaaaattttttccaggcaaattatagccattagttttttggttttcagaatagttgaaaagagatgtggtgttcataagtcattacattcagaacaagtgtgatttagggcttttctttccaaggacctactggttgaggctcagtggtgttaaaatttcttaaacatattcctaacacctggattttgtagccaaggttcagtcagtcacctctcatccaagcctcaactgaaaagtacagtgggttgtgaaaactaaatgtgaagatgctgttgacatctatgtgtcccctggaggcaagtgctgcagccctgcagtttggtagagagtgggacctacagggctgtacttccctgtgacaggtgtgactgtagattcttgtcccaggtgctgtgccataggcttggtgtacccagcccagtaattcacctcacctctagacactgaagctttgtcaaagtccctctctgatttggagtcttctgcacccataatttcagtgggttgaaagtgaaattaaacattctcttccttttccataatcttatagatggagaattctatggactctgttaaccttgatgaactttgtttctttgaaatgtagaaggaacgtttgggaatttctcaagatgtgaagatctattttaacttggatatcttgatctaaaatttcacaaaagtttctttctcatttactttgtaaaaattcttatgggctactttatttggccttatggccatataagaagcataaatgtattggccattactctaatggcctataacttgtcaggatatgtttaagctttgataaagtttgtttttctttagttctccaagggacttagttggattttgtctttaatcttgcagcatccacaaatccagaagaaatctcaatatatcaaatacctttgttgtgatgatgtgaggacactgcatcagtgggtcaatgggatccgcattgcaaaggcatgtctccttttgatttgatgatggaataatgaggtgtttgtcgatgatatagttttcgttttcatgacaactattctgactatttcatgttcatggatttgccagtgcctacgtttttcaggcctaagtttcaagttttaaatgttgtcttttttccttgtttatagggataaacttttaacatttggtatacttggaataatattgctggtaaaagcttgtgtagtatcaaagtgatttattttggctttggagaatgcattatatgattcttaaatagtagagtttagcctaagcaaagtaagttttggaaaaattaaattactttaagtaatgatcatttaccaaccacatttggagcagtatcctgaagagtgctaaaaagctgcccttggatcaagaatttggggtgaaaaaacattaatgtttataacaaacagaatcaagtgttgacttcttgctgcccctctaaaaatgaggagaaataagaatagattataatttatggtattagaggaatttttgaactatcataggtattaattttaatacagaccatcaatcagtaaacagaaatatgtcccccatttcaccttatccttctgtatcatactcagtaaagtttagatgtcaccatttcctgtcttctctttagtatgggaagcagctctatatgaactaccaagaagccttgaagaggacagagtcagcctatgattggacttccttatccagctccagcattaaatcgggatccagttcttccagcatcccaggtagttcaaaatgcttcaaagcactattttgcgattaatatgaaggtctctgtagagactgatagtagacctggaaatttcaacttgattcttaaaaaccggagccatacttaattcctaaattataatcaatagatgcctttttaaaaattgctagagggtacagtatcatgggctagttcacaaatgtatttgaaatgaaaaatcagtatatagatttctaaagccagttttgttatttatatttataaaatttattcaaaacatacatactgctggacactgttaatgcataatttgggataaaacattacttggaaagaatctttgtactcagaaaccatgaagaagctgcactccttcagattcctatatcctttaaacaagtgcatgctatgattacatcttaacataaatcttctttcaattcaaaatgtttcatgaatgagatccatgtcatctaaaagcagaatttttaaatttttgcattggatgtgatgaaagaaataataactttagtagtatatttaaaagctgcatgactctatttcatctctattaagtaaaaacaaatttagaatgtgtatatacacatacatttcctagtgctgtccactgaggactagaagcagtgataccccaggaacaatgagaatacccagtccctagatcatagaggtttctttttgttttttcgttttattaaattttggccaaggatgctgcttaaatagatcatggtttctaataccattcttcaaaaaaaaaaaaaaaaaagaaagaaaagaaaaccaaggctctcaaagaaatggcaaattatagggctgcagcagagaatatatacaagatgagcctagagcatcttgtaatgccagaaagtaagggaatgcttaaaaaacgacagtagggccaggcacagtggctgacgcctgtaatgccaatgctttgggaggcctaggttaagggatcacgtgagcccagtagttcaaaaccagcctgggcagcacagcaagaccccatctccacaactttttgttttttttttttttaaattagccagacttagtagtacacatagtcctagcaactcaggaggctgaggcaggaggattgcttgagcccaaaagttcaaggctgcagtgagctataatcacaccactgtgctccagcttgtgcaacagaacgagaccctgtctcacaaaacacaagatgagaatatgtcaaagggatacacagaggagccagtctgaaagagctccaaaggtcaaagctggaacaatttgagcaatacaataagtaatatagtataggattgtaacccatggacataaatatccatgagtttatactgatgtaaataaatcattgaataaataaatggggaagaggagagaactgtcctgtgtagatttctaaatgatttatgaagacactttgtcctgaaggaagtagagcttacctaagtcctcaagtgtggactgtgcttagtgacttgcttccagtgattatggaacggggattaggggtaacttcacagtggagaaacctgacaaacactgccacaaccatgtggtcaaggtcagtatctaagtcacattggttatagggacctttgacatagtgtgtgagaatggcttttttcctctatgatcttcctccccaagttccataaacagactaatcaagagaaaaagcatcagacaaaccaaaactgagagacagtctacaagatacctgaccactattcctcaaaactgtctaagtcatcaaaaacaggaaattctgagaagccgttataggagacatgatgactaactgtgacgtggtgtcctggatcagaaaaggcacatgagggaaaaactagtgaaatccaaataaagtgtggagcgtagttaatagtagcaggacatttccttagttgtgacaaatgtagtatagtaatgtaacatgttaataatggggaaaagggaataaaattaaaagaggacactttttccccaaaggagaatttctttaaaaccaaacatattgctaaatgggtaaactggatgccgggtatgtaggaattctgtgctaaaactgttctaatattcaaatatctaatatgtagatatcttaaaactattctaagaaaatatttattaaaatggggaggagaaaccatccagcaacccttccagaacatggttccccttccttttccttccttcctctcccatcacccaggctggaatgcagtggtgttatcatagctcacttaactctcctgggctcaaatgatcctcccacctcagcctccttgctcaggcggcaaagagacactgtatgctcacagccattcccaccaggccccactcctttcaaaacttttttgtgccttgctgacaggccaggatacagcacagctgccaccctatgggtccaatacctaaatccctaggaaacacacttcgcactagagggtcaaattctaagtattgctcattgctagaaaaaaggaaataatcattgtgtatagatccgaattcctaagttacaattctggcgtgaccttaaggcaggggtattaaaaaggctgattctcaatgtaatgcagacatgattgagagactcctctactgatggttcattaattcttttattgtttagagttgatttcatgcaagactgggtgtcaggataccaataatgttatgtgaatcatttattataattatcagtctctcatggtgaaatatttaacactaatctgagatttcttaattccaaggtaagggaagttttctagtagaaaatactggctgtgtttatgatgaaatgagtaaaataacttggtgctgttgtacacagcacttgaccttgtgtaaaagatctaactagacatacatatgaatattgtcagaatactgactcttttaaacctatgtttaaaaaactattttaaacagagtctcagtcaaaccactccaatcagtctgatagcggagtttctgacacccagccagcaggacacgtccgttcccagagcattgtgagctccgtattctctgaagcctggaaacgaggcactcagttggaagagtccagcaaggtaacagcttcgttttaatttacattgaaaattctgtggtattcttttgggtttaaattgttgctctcttatgtctttatcggggatcttatttggccttatttcagtctcctttattaattttcaatcttcctaattgtagtgggtaaagacagttcagagagacctgttgatttgacttccccttggaaatgagtattttacaaattggctctaatgacttaaaatctc

SEQ ID NO: 1058 - DNA, 140 bp, Homo sapiens
gagtgcaatggcatgatctcagctcactgcaacgtccgcctcccgggttcaagcgattctcctgcctcagccttccgagtagctgggattacaggcttgcccaccatgcctggctaatttttgtatttttagtagagacg

SEQ ID NO: 1059 - DNA, 548 bp, Homo sapiens
ttgttatttatatttattttttttattcaaaacatacatactgctggacactgttaatgcataatttgggataaaacattacttggaaagaatctttgtactcagaaaccatgaagaagctgcactccgtcagattcctatatcctttaaacaagtgcatgctatgattacatcttaacataaatcttctttcaattcaaaatgtttcatgaatgagatccatgtcatctaaaagcagaatttttaaatttttgcattggatgtgatgaaagaaataataactttagtagtatatttaaaagctgcatgactctatttcatctctattaagtaaaaacaaatttagaatgtgtatatacacatacatttcctagtgctgtccactgaggactagaagcagtgataccccaggaacaatgagaatacccagtccctagatcatagaggtttctttttgttttttcgttttattaaattttggccaaggatgctgcttaaatagatcatggtttctaataccattcttcaaaaaaaaaaaaaaaaaagaa

SEQ ID NO: 1060 - DNA, 616 bp, Homo sapiens
cccacacccgcctctccttgctacacccagagctgcaggaagatgggatatgtgggagagcaccttgtaaatgcctggtcattcctcatctgtcacaccccattactgccactccctgagtacgaattgccctctgttttttgggaatgagttagtgccactcccccactagaccctcagcttcccaaggactggagtcatgacatctgtgtctcctctccctctagttcagaaacagagctagaaacagagaaagccagcgataaataactattcacatttcctgtgggccaggcgtgatgccaagctccctaaatgggttttcttctttcatctctgcaatagccaagtattattgtccccattttaaagataagacactgaggctcaggggttcctggaggtggcctggcctcaggtcctaggacggggaggtgctggcttggctaagaggtcaggaagcttcccagcagggagggggaatgcagcagtgtgcagcgctatggtccttgaggatctggtgagactccttccctcagcagtcagattccagaggtgacaaatgggaaagggttttcttctttccagtcattgccttcagctagacttggctgaa

SEQ ID NO: 1061 - DNA, 640 bp, Homo sapiens
ctcacttgaaccccggaggtggaagttgcagtgagccgagatcatgccactgcactccagcctgggctacagagtgagactccatctcaaaaaaaaaaaacaatgtatatagcaatctttccagtaattcattttaattgtattttttaaagtattggtcctcaacaaaattggacactttataaagtggtcctcacctcaaatcatttgagaaacacggctcaaagcccttgctgccaattgacagacaggcttgtttgtgtttgttgttcatcctctgcctccccaactccaccgcccactccacgtggcaaggattcactgggctttgttcactgctgattccctgggcctcaatgtatatctggtgagtgaatgaatggataaatgaagcaatcaacctcaagtaggtctcataactttctggtcacttttgattattgaatctgcatccgccaggtgcggtggtgtgcacctgtagtcccagaacttgggaggctgaggcaagaggatcacttgaggccaggattttgaggctgcagtgagctctcatgacactagtgtactgcagcccaggcagaaaaccaacactttgtctctaaaaacaaaaataaagaaataaactcaatccaatgtcctt

SEQ ID NO: 1062 - DNA, 565 bp, Homo sapiens
atttttaattatgaataaactagattcatcttcatcatagtaatatggcaatggatactggactcttgaaccaggagtaaaaaaatgaaaaaaaaaaccccttcaaatataggaatagaaatactagagatagtaaaaaagagctatctgaatttgagaaatgtatgttttaaatatatctaccaaagaacagtattttcagcattgttttgggggaaataccataagatgtaaagaggtacccacttggtgtaacagctatgaggtctgctgagtgtgaagctcccctcctttgcctgcatgggaattgagacatctcacggtttctggggcacaggatctgcaggtcataagggcaagttttgaggaaaatacccatttttgagttgaatttttactaaaaagttagcatatcctttctgatcttgaataaagttaaaagctccagataaagggttttctaggccaggcatggtgcctcacgcctgtaatcccaacactttcggaagcaaaggtgggaggatcacttgaggccaggagttcgagaccagcctggccaacacgg

SEQ ID NO: 1063 - DNA, 4139 bp, Homo sapiens
tccgcagcttcattcttgacgtcagtgagaccaagaacccaccaattccggacacaaagggatgagtcataccactgtctcctcacaccggacatgggatagccacagcagaagccactttatggcccagagaaattccagggaaaaaggattgtattaattgataacatcatcagcaatgcatgaaagcacacatctcctcatacctggtcattacaggataatctttactaactgattagtgggtagcatgttgttatttgttttgggattggtacacttgagccttttccaagcttccatggttgtatattctcttatttggagtggtctgttcatgtcctatggtcactgatttgtaggagatctttatgccaaagttactgatctttcttcactgcaaatacttgttccagtcattacttttttattggaaagcgtcagattatacacagaaattccaggcagactaaaatgttttccaaaataatagaaaatttgaagagaaccaagtttcaaattcttaatagctgttagaagaaacaattttaaaagaaatatatacgtattttttgtgacaaggtctctctctgttgtccaggctagatagtatgatcacagcacactagtcttgaactcccaatcaatcctcccaccttagcctcccacgtatctgggactacaggcgcaagccacaacacccagctaattttttttttgtagagacgggttttcgccatgctggtctcaaagtcctgggctcaagcgatccacccacttcagcctcccaaagtgctgggattacaggtgtgagccattgcacccagccaaagagaagtatttaaatacctaaaatatacagacttctgaataaaacaaatccaaaataaaggtggaatgctgctgacaaatcaggcagaagataatggttgagaagactgttatcagcatgaaaattcagggccctggcctttgatgttatatcccaaaaaggtagatagcccacatgttccagtaggtcatgtgccacctctttctccttggagaggaggaggtgagtggcaagaaaatgtagcctgggaatcctcctcagaaagaagggcattgaagcccacttcctggctccgtggacacctgagcctgcattctcaacagtggatcaatggcagcctgacatagcaagaacaggcagaatgatattaagctcattttaagaatgcaggaaaaaaactatactttttggaaggatttccctgaaaaccctaggttattggaatccagaataacttgtactgtgtaacttacgttgtcctgtgatacacagtctttctaaacaaatgttcctgtatattgaatttaattattctcatcttaattggaatatgactttgtctttaatgattagaaattggggcctgaatagtagtgggcactgagcagctgccactgagtcacatgccagctgtggactcagctaacacaggttggcagcttcctttcatagaagatttaagatagcaccacagtgttctcattttctctcaattaatattgaggtgacctcaggtttctggactttcatctcagtgatctcatctaggtacctgggtgatctcttggctctgaagtaacacctcagtaatctcagttcctctttggactgttacctcagtgatctcagctccattctgaagtaacttctcagtgatcatagcttttccctaaagtaacctctttctaaagcatcacccctagtgatctcaacctttctctgaagaatcaccttagtgatttcagccacctctgaagttaacacctgtgtgatctcaactccagtgaacaactcagttatttcatctcctttctaaagttaacagcttagtgatctcatttcctttctgaagaatcacatcagcagtctcagcctctcttaagtaacatctctgtgatctcagcttctaacacctgagggacaccatcttggtcctgaataatacctcagtaacctcagctcctcccttaagtaacatctcattggtatcagcttttctctgaagcagaacctcagtgatctcagctcctaagtaacatctcagcattctcatctttccgatggtacaatatagtgatttcacttcctttatgaaatagcactcagtgacctccattcttctagagtttcacattagtgatttcaacttctctgaagaaacacctctgtgatctcagcttctctgaagaattacctcaatgatctaatctctaaagtaataccttagtgatcccatttccgttatttcagctcctctgaagtaaacctcagtggtcagagctactctgcagtacccactagtgatgtcaattcctttcagaagtaacacccagtgatctcacctcctctctgatgaaacacctcagtgtactcagatcctctgaagtaacaaaaattgtctcactttctttctgaagtgacgcctcagtgatctcagctcttctccaaagaaacagttaagctcttgtcttctctgaactaacaccttagttattttatctatctgaaacaacacctcacagaatggcaacacctctaaggttaacaccttggttatctgagctatctgaggtttcacttcagtgatctcagtccctctgaagtaacacctcagtaatattagttcctctggaatttcacttcagtggtttcagttgctctgaagtaaaacaccagtgatgtcagctcctttctcaagttaaccaatcagttaccagttcctctctggagttaataattcactgttgtcagtgtctgtacatagaagggggaacaagcttttgtctacatcgtggtgttttgctgtggacttaaggatcaatgcctggatgggcacagcagctcatgcctgtaatcctaaccttttgggaaggtgaggtgggaggactgcttcagcccaggagtttgaggcagcggtgagccatgatggcaccactgcactccaacctggtgacagagcaagaccgtctttaaaacaaacaaaaaggatcaatatcctggtgactatttcctccccaccaaactgacagatgttgggggcgggggcctggggtgaagacagcccttctctatctcaggcacttaacatgttgagaatttcaagtggcttgaacctcatacatttgtttcgtttgcagctggctgctactagaaatggttctgattcggtttcaagaactgtatccttggccgggtgcggtggcacacgcctgtaatcccagcactttgggaggccgaggcgggcggatcacctgaggtcaggagtttgagaccagcctggccaacatggtgaaacctcatctctactaaaaatacgaaaattagtcgggcgtggtagcaggtgcctgtaattccagctacttgggaggcagaggcaggagaattgcttgaacctgggaggtggagattgcagtgagctgagattgtgccattgcacttcagcctggggaacaagagcaagactttgtctcaaaaaaaaaaaaaaaagtatgcttaaaacagaacaaataattctgaatacaaatttttaattatgaataaactagattcatcttcatcatagtaatatggcaatggatactggactcttgaaccaggagtaaaaaaatgaaaaaaaaaaccccttcaaatataggaatagaaatactagagatagtaaaaaagagctatctgaatttgagaaatgtatgttttaaatatatctaccaaagaacagtattttcagcattgttttgggggaaataccataagatgtaaagaggtacccacttggtgtaacagctatgaggtctgctgagtgtgaagctcccctcctttgcctgcatgggaattgagacatctcacggtttctggggcacaggatctgcaggtcataagggcaagttttgaggaaaatacccatttttgagttgaatttttactaaaaagttagcataacctttctgatcttgaataaagttaaaagctccagataaagggttttctaggccaggcatggtgcctcacgcctgtaatcccaacactttcggaagcaaaggtgggaggatcacttgaggccaggagttcgagaccagcctggccaacacgg

SEQ ID NO: 1064 - DNA, 4139 bp, Homo sapiens
tccgcagcttcattcttgacgtcagtgagaccaagaacccaccaattccggacacaaagggatgagtcataccactgtctcctcacaccggacatgggatagccacagcagaagccactttatggcccagagaaattccagggaaaaaggattgtattaattgataacatcatcagcaatgcatgaaagcacacatctcctcatacctggtcattacaggataatctttactaactgattagtgggtagcatgttgttatttgttttgggattggtacacttgagccttttccaagcttccatggttgtatattctcttatttggagtggtctgttcatgtcctatggtcactgatttgtaggagatctttatgccaaagttactgatctttcttcactgcaaatacttgttccagtcattacttttttattggaaagcgtcagattatacacagaaattccaggcagactaaaatgttttccaaaataatagaaaatttgaagagaaccaagtttcaaattcttaatagctgttagaagaaacaattttaaaagaaatatatacgtattttttgtgacaaggtctctctctgttgtccaggctagatagtatgatcacagcacactagtcttgaactcccaatcaatcctcccaccttagcctcccacgtatctgggactacaggcgcaagccacaacacccagctaattttttttttgtagagacgggttttcgccatgctggtctcaaagtcctgggctcaagcgatccacccacttcagcctcccaaagtgctgggattacaggtgtgagccattgcacccagccaaagagaagtatttaaatacctaaaatatacagacttctgaataaaacaaatccaaaataaaggtggaatgctgctgacaaatcaggcagaagataatggttgagaagactgttatcagcatgaaaattcagggccctggcctttgatgttatatcccaaaaaggtagatagcccacatgttccagtaggtcatgtgccacctctttctccttggagaggaggaggtgagtggcaagaaaatgtagcctgggaatcctcctcagaaagaagggcattgaagcccacttcctggctccgtggacacctgagcctgcattctcaccagtggatcaatggcagcctgacatagcaagaacaggcagaatgatattaagctcattttaagaatgcaggaaaaaaactatactttttggaaggatttccctgaaaaccctaggttattggaatccagaataacttgtactgtgtaacttacgttgtcctgtgatacacagtctttctaaacaaatgttcctgtatattgaatttaattattctcatcttaattggaatatgactttgtctttaatgattagaaattggggcctgaatagtagtgggcactgagcagctgccactgagtcacatgccagctgtggactcagctaacacaggttggcagcttcctttcatagaagatttaagatagcaccacagtgttctcattttctctcaattaatattgaggtgacctcaggtttctggactttcatctcagtgatctcatctaggtacctgggtgatctcttggctctgaagtaacacctcagtaatctcagttcctctttggactgttacctcagtgatctcagctccattctgaagtaacttctcagtgatcatagcttttccctaaagtaacctctttctaaagcatcacccctagtgatctcaacctttctctgaagaatcaccttagtgatttcagccacctctgaagttaacacctgtgtgatctcaactccagtgaacaactcagttatttcatctcctttctaaagttaacagcttagtgatctcatttcctttctgaagaatcacatcagcagtctcagcctctcttaagtaacatctctgtgatctcagcttctaacacctgagggacaccatcttggtcctgaataatacctcagtaacctcagctcctcccttaagtaacatctcattggtatcagcttttctctgaagcagaacctcagtgatctcagctcctaagtaacatctcagcattctcatctttccgatggtacaatatagtgatttcacttcctttatgaaatagcactcagtgacctccattcttctagagtttcacattagtgatttcaacttctctgaagaaacacctctgtgatctcagcttctctgaagaattacctcaatgatctaatctctaaagtaataccttagtgatcccatttccgttatttcagctcctctgaagtaaacctcagtggtcagagctactctgcagtacccactagtgatgtcaattcctttcagaagtaacacccagtgatctcacctcctctctgatgaaacacctcagtgtactcagatcctctgaagtaacaaaaattgtctcactttctttctgaagtgacgcctcagtgatctcagctcttctccaaagaaacagttaagctcttgtcttctctgaactaacaccttagttattttatctatctgaaacaacacctcacagaatggcaacacctctaaggttaacaccttggttatctgagctatctgaggtttcacttcagtgatctcagtccctctgaagtaacacctcagtaatattagttcctctggaatttcacttcagtggtttcagttgctctgaagtaaaacaccagtgatgtcagctcctttctcaagttaaccaatcagttaccagttcctctctggagttaataattcactgttgtcagtgtctgtacatagaagggggaacaagcttttgtctacatcgtggtgttttgctgtggacttaaggatcaatgcctggatgggcacagcagctcatgcctgtaatcctaaccttttgggaaggtgaggtgggaggactgcttcagcccaggagtttgaggcagcggtgagccatgatggcaccactgcactccaacctggtgacagagcaagaccgtctttaaaacaaacaaaaaggatcaatatcctggtgactatttcctccccaccaaactgacagatgttgggggcgggggcctggggtgaagacagcccttctctatctcaggcacttaacatgttgagaatttcaagtggcttgaacctcatacatttgtttcgtttgcagctggctgctactagaaatggttctgattcggtttcaagaactgtatccttggccgggtgcggtggcacacgcctgtaatcccagcactttgggaggccgaggcgggcggatcacctgaggtcaggagtttgagaccagcctggccaacatggtgaaacctcatctctactaaaaatacgaaaattagtcgggcgtggtagcaggtgcctgtaattccagctacttgggaggcagaggcaggagaattgcttgaacctgggaggtggagattgcagtgagctgagattgtgccattgcacttcagcctggggaacaagagcaagactttgtctcaaaaaaaaaaaaaaaagtatgcttaaaacagaacaaataattctgaatacaaatttttaattatgaataaactagattcatcttcatcatagtaatatggcaatggatactggactcttgaaccaggagtaaaaaaatgaaaaaaaaaaccccttcaaatataggaatagaaatactagagatagtaaaaaagagctatctgaatttgagaaatgtatgttttaaatatatctaccaaagaacagtattttcagcattgttttgggggaaataccataagatgtaaagaggtacccacttggtgtaacagctatgaggtctgctgagtgtgaagctcccctcctttgcctgcatgggaattgagacatctcacggtttctggggcacaggatctgcaggtcataagggcaagttttgaggaaaatacccatttttgagttgaatttttactaaaaagttagcataacctttctgatcttgaataaagttaaaagctccagataaagggttttctaggccaggcatggtgcctcacgcctgtaatcccaacactttcggaagcaaaggtgggaggatcacttgaggccaggagttcgagaccagcctggccaacacgg

SEQ ID NO: 1065 - DNA, 565 bp, Homo sapiens
atttttaattatgaataaactagattcatcttcatcatagtaatatggcaatggatactggactcttgaaccaggagtaaaaaaatgaaaaaaaaaaccccttcaaatataggaatagaaatactagagatagtaaaaaagagctatctgaatttgagaaatgtatgttttaaatatatctaccaaagaacagtattttcagcattgttttgggggaaataccataagatgtaaagaggtacccacttggtgtaacagctatgaggtctgctgagtgtgaagctcccctcctttgcctgcatgggaattgagacatctcacggtttctggggcacaggatctgcaggtcataagggcaagttttgaggaaaatacccatttttgagttgaatttttactaaaaagttagcataacctttctgatcttgaataaagttaaaagctccagataaagggttttctaggccaggcatggtgcctcacgcctgtaatcccaacactttcggaagcaaaggtgggaggatcacttgaggccaggagttcgagaccagcctggccaacacgg

SEQ ID NO: 1066 - DNA, 6511 bp, Homo sapiens
aatcctagttacttgggagactgaggcacaagaaaagcttgaacctggggtgggggcggagactgcagtgagccaagatcatgccactgcactgcagcttgggcaacagagcaagactatctccacacacacatacaaaaagttttttaaatttatgtaatttctcactaatatataagctttttccttgtttcatacaaaacaggactccacacacttaggatggaaatccacacacttaggatttccaaccattttacatgatgcttgatgaaaatatctttttatatcactttatccatacaatactttagtcttttaagagaatactgaaaatagtccgactttcaaattttaagtgcaataattagtatggttaattgatatttaggaagggcatgtaatgttcttagaaaaagaactttatttggaatgtaagattttattgggataatggttcttatgccttaaattcccttagttcaaataaactaatgttaaagaattatggctgttttttaccaaaattctctacaattgtatgattactctccaacataacttcaagatgttgaggaaaataaaacaggtagtctctgaagtttttccacaggaacagcacgctaagtgcttctttctggagttattttgtgacactgaatcgccaaagaaaagcttcctatagagttaacagagacttctcttgggctgaaggctgcttgtggttccacatgcagtttctgtgagaatggattcttgtgtcagccatgggtcacaactttctgtgcactttctggtgctggattaggtggccatgctggttgaaggcacgcccacactccccgcactcatagggcttctcgcctgtgtggatccgctggtgctggatgagcactgagtactggctgaaggccttcccgcagctattgcactcatatggcttctcgcccgtgtgggtcctcaggtgcacaatcagagttgctttcaggctgaaggctttgccacattctgtgcactggaagggcttttcacctgtgtggattctctcatgctggatcagagaccggcgtgcactgaaggcgtgcccacattcaccacacacatagggcttctccccagtgtggactctctggtgctggatcaggtgtgagtgctgaacgaaggccttcccacattcgtagcatgcatagggcttttcctcggtgtggatccgctcgtgattcatcagtgtggagcggtggctgaaggtcttcccacactcactgcactcatagggcttctccccggtgtgcacgttgtggtgctgaatgaggactgagcggtcgctgaaggccttcccacactcgctgcacgtgtagggcttctccccggtgtggatcctctggtgctgcagcagtgtcctcttcacactgaaggttttcccacactcattgcacctgtgaggcttctccccagtgtgtaccctctggtggctccgcagaacagtgctatggttgaaggctttcccacacaacggacacacatatggcctttctcccgtgtggatccgctggtgctgaatgagatgtgagagttgagtgaaggctttccgacactcaagacattcgtgaggcttctctcctgtatgtatcttgtgatgctgagcaagatctgagctcactctaaaggcttttccacactcattacactcatagggcttctcacctgtgtgaattctcctgtgtttactaaggactgagctctggctgaaggccttcccacatacactgcacacatagggcttctctccagtgtggatacgctgatgctgaaggaggtgggaactccggccaaagcacttcccacactcaacacacatgtagggcctctctccactaggcactgcctggtgcggagtgagtggcatgctttggcttaagacctgaacttcacggtggtcaacagagtttggactcagacagaagctttgctttgtttcattattttcttgatcaatcctccccaagggtgttttccccagaatcactgtttgctctgaaattaatggcttcggactcaagtctgtattttgactctctcccttggtttcacattctgaaagaacaaatccaaaatgaaaatgttaacactactcaaaactgaagagctagtgcaaccctgaaactggccttgctgatgaaggtgcaaaatccctcaatgcacacgttggtgtgagctacagaagaacagaaccaccataactgtgtcaaacaactagatatcagaagataatgtttccagacaggaaggtgccaaggcaagctttaagagaaaggtgtaaactccagtttgaggtcacacccctgtgtggagtccacagaacagcagggaaacagcccagtggtgcctgagtcctgccctcccaggggtcctcatgtggacagagctgaaatacaggcccacataatgtgggtgccttgtggggcagacagcagcacttgggcaggcagggagaggtgtgagctattgtgagcaagtcggggtgtgccatctggaggccaacagacttgtacatgaggtaggggtggtggtgctgccacctctttgtggaaaataatttctttttttttttttttgagaaggagccttgctctgttatccaggctggagtgcagtggcacaatctcggttcactgcaacccccacctcctggggtcaagcgattctcgtgtctcagcctcctgagtaactgggattacagacgcacaccatcatgcctggctaatttttgtatttttagtagagatggggttttatcgtgtcggccagactggtcttgaactcttgacttcaagtgattcacccacctcggcctcccaaagtgctgggattacaggcgtgaaccatcggacctggccatgtggaagataatttcatgtggagaatgcactggcaggaggaggggagggaaggacaagactgaaggtgcagaggggcatgatgggaatctgctgccaagtttaggccacagatgaggccttcaggagcagaagcatagatggcgggaaaggcaggggtggagactcttctgggagcaggtcgagcgctctgcaggctgattgtgtgtgagtgggtgggaggtaagaggtgctgaggacaacagtgattttttttttagatggagtctctgtcacccaagctggagtacagtggctactatcatagcccactgcagcctcaagctgcttggggctcatatgatcctcccgcctttgcctcccaaagtgctgggagtacaggcatgagccattgtgcctggctctaaacattattatattttattttacttagttatgcgtgtttctgagctttctatagtttcatggagcacagtcttctggaactcgttttcccgtcagcattatgtttttgagatccatcatgttgttgtacagcagttaatcattttcactgcagtatattccattaagttaaaataccatagtttatttatgtctattctgtttatgaacataattctttttttagagacggagtcttaccctgtcgcccaggctggagtgcaatgggacgagctcggctcactgcaacctctgcctcccgggttgaagtgattctcctgcctcagcctccccagtggctgggattacaggcacatgccaccatggctggctaatttttttgtatcttcagtagagacagggtttcaccatgttggccaggatggcctcaaactcctgacttcgtgatctacccacctcggcctcccaaagtgctgggattacaggcaggagccacggcgcccggtcctgaattcttttcaaatgtttttttaaatcatgaagcatgcttctgtgaagattctcctatgtttcctggtgcttacacacaaatgtccttgctgtatacatatgcaagagtgggaagtggtgaacataggaattcatgttttcgattttttttttcattttttttacctccattctctcagaatgtgatcatgttttcaatttcattggataatgccaaacttttccaaagtggctatgtgaatttacatccctattagctgccctgcatcctcacccacatgttatattgtcagatctttccattttttccattctgaaggtgtaacatcatgtcacagtggttttgatttccactttactgatgaataatgaggctgagcagttttcttatttattggccctttggttttcctaatctatgcagaaatttgtgcctacttttctttttgggtaattctgcgtctttttattctattcagaggaatttattaagtgtattgacaaattgaaacagtgagaatttaacagtttttttaataaaaaaatttaaattcactgtcttcagtttaatacaatttttttgagacagagtttcgttcttgttgcccaggctggagtgcaatggcacgatctcagctcaccgcaacctctgcctcccaggttcaagcgattctcctgcctcagcctcccaagtagctgggattacaggcatctgccaccatgcccagataattttttgtatttttagtagagatggggtttcaccatgttggccagcttggtttcaaactcctgacctcaggtggtccatctgcctcggcctcccaaagtgctgagattacaggcatgagccaccacccccggcccagtttaatacaatttttaacatatctcattttagaaagtcactctatgtgggtttttttttgagacagggtctcactctatcacccaggctggagtgcagtggtgtgatcatggcttactgcaacctcaacctcctgggctcaaggaatcctcctgtctcagcctccatgtggctgggattacaggaatgcaccatcatgtctggctaatttttaattttattttgtagtgtggggtctcagtatcttgcctaagctggctatgtgttttttaaactgatagaagttttagttctttctttttttaatgtataagcctcatcttcatggaataaaagcctataggctaaagaaatagttactcatttacactgaaaagtattacttctattgtctgaagtttcacccggtgtggtggctcatgtctgtaatcccaccacttcgggagggcaaggtgggaggatcacttgaggccaggagtttgagaccagcttgcgcaacatggtgaaaccccgtctctacaaaaattagctgggcatggtggtgtacacctgtggttatagctactctcgggaagctgttgtgggaggattgcttgattccaggaggttgagactggtgagccgtgattatgccactgcactccagcctgggcaacagagtgagagcctgtctaaaaaaaaaaaaaaaaagtttcctgaatgggcggcttctgacctgatgccagggtaacaagatagacaagatgtctttaataataaaaacacaggccaggcacagtggctcatgccggtaatcccagcatgttgggaggctgaggcaggaggattgcttgagcccaggagtttgagaccagcttgggcaacacagcaagactctgtctttacactgcactccagcctgcaaaaaagaaaacacacacacacactcaactaactgcataagagactactcgctcaatcatccatggcacgaaagcatcatatgactgcttgtgagacagaatcaagttgctgtgaaggccaaacttgcctgcaccttgcatccatactgtgcagaaggtggacttcagccaagagtcacttgcttttagaataatggttttggttgttaagtataaagtagggaagtatgttttaagcatgacggaacaaataaaaggaaacaaaatgatttcaccgaaataaatgtttaattataaaaacccagtaatctctctaggcctactatggctcacaagaaaaggaaaaatgttttaaaaattaaaaacacaaaaagcccctccctggtgttttgtagcaattgtgtgagttgtttaacacgcttcatagcaccgagtcgcctctacattcttgtaaaacattagtgttaacaccttcagagattgtactgaattaaaaagatcaggcatacacttaccccatggacaagataaactgtcttgttgtgtacaggctgtagtgtggtcatatttgaggttgtctggaaaaaaaacagcgagttgaagtgacaacaaaatactcccttcaagagtggaaaatcctggccgggcatggtggctcacgtctgtaatcccaccactttgggaggccaaggtgagtggatcacttgaggtcagaagtttgagaccagcctggccaacatatagtgaaaccccgtctctactaaaaaatacaaaaattagctggacatggtggtgcatgcctgtactccccactactagggaagctgaggcaggagaatcgcttgaaccccggagacaagaatttgcagtgagccgagatcacactactgcactccagcctgggggacagagtgaaactccgtctctca

SEQ ID NO: 1067 - DNA, 102 bp, Homo sapiens
ggcacacgcctgtaatcccagcactttgggaggccgaggcgggcggatcacctgaggtcaggagtttgagaccagcctggccaacatggtgaaacctcatct

SEQ ID NO: 1068 - DNA, 258 bp, Homo sapiens
ctgtggaagctttgttcttttgctctttgcaataaatctagctactgctcactctttgggtccacactgcttttacgagctgtaacactcaccgcgaaggtctgcagcttcactcctgaagccatcgagaccatgaacccaccgggaggaatgaacaactccagacgcaccaccttaagagctgtaacactgaccgcgaaggtctgcagcttcactcctgagccagtgagaccacgaacccaccagaaggaagaaact

SEQ ID NO: 1069 - DNA, 10061 bp, Homo sapiens
  SITE (5417): n equals a,t,g, or c
  SITE (5421): n equals a,t,g, or c
  SITE (5585): n equals a,t,g, or c
  SITE (5601): n equals a,t,g, or c
  SITE (5604): n equals a,t,g, or c
  SITE (5605): n equals a,t,g, or c
  SITE (5607): n equals a,t,g, or c
  SITE (5608): n equals a,t,g, or c
  SITE (8660): n equals a,t,g, or c
aatcctagttacttgggagactgaggcacaagaaaagcttgaacctggggtgggggcggagactgcagtgagccaagatcatgccactgcactgcagcttgggcaacagagcaagactatctccacacacacatacaaaaagttttttaaatttatgtaatttctcactaatatataagctttttccttgtttcatacaaaacaggactccacacacttaggatggaaatccacacacttaggatttccaaccattttacatgatgcttgatgaaaatatctttttatatcactttatccatacaatactttagtcttttaagagaatactgaaaatagtccgactttcaaattttaagtgcaataattagtatggttaattgatatttaggaagggcatgtaatgttcttagaaaaagaactttatttggaatgtaagattttattgggataatggttcttatgccttaaattcccttagttcaaataaactaatgttaaagaattatggctgttttttaccaaaattctctacaattgtatgattactctccaacataacttcaagatgttgaggaaaataaaacaggtagtctctgaagtttttccacaggaacagcacgctaagtgcttctttctggagttattttgtgacactgaatcgccaaagaaaagcttcctatagagttaacagagacttctcttgggctgaaggctgcttgtggttccacatgcagtttctgtgagaatggattcttgtgtcagccatgggtcacaactttctgtgcactttctggtgctggattaggtggccatgctggttgaaggcacgcccacactccccgcactcatagggcttctcgcctgtgtggatccgctggtgctggatgagcactgagtactggctgaaggccttcccgcagctattgcactcatatggcttctcgcccgtgtgggtcctcaggtgcacaatcagagttgctttcaggctgaaggctttgccacattctgtgcactggaagggcttttcacctgtgtggattctctcatgctggatcagagaccggcgtgcactgaaggcgtgcccacattcaccacacacatagggcttctccccagtgtggactctctggtgctggatcaggtgtgagtgctgaacgaaggccttcccacattcgtagcatgcatagggcttttcctcggtgtggatccgctcgtgattcatcagtgtggagcggtggctgaaggtcttcccacactcactgcactcatagggcttctccccggtgtgcacgttgtggtgctgaatgaggactgagcggtcgctgaaggccttcccacactcgctgcacgtgtagggcttctccccggtgtggatcctctggtgctgcagcagtgtcctcttcacactgaaggttttcccacactcattgcacctgtgaggcttctccccagtgtgtaccctctggtggctccgcagaacagtgctatggttgaaggctttcccacacaacggacacacatatggcctttctcccgtgtggatccgctggtgctgaatgagatgtgagagttgagtgaaggctttccgacactcaagacattcgtgaggcttctctcctgtatgtatcttgtgatgctgagcaagatctgagctcactctaaaggcttttccacactcattacactcatagggcttctcacctgtgtgaattctcctgtgtttactaaggactgagctctggctgaaggccttcccacatacactgcacacatagggcttctctccagtgtggatacgctgatgctgaaggaggtgggaactccggccaaagcacttcccacactcaacacacatgtagggcctctctccactaggcactgcctggtgcggagtgagtggcatgctttggcttaagacctgaacttcacggtggtcaacagagtttggactcagacagaagctttgctttgtttcattattttcttgatcaatcctccccaagggtgttttccccagaatcactgtttgctctgaaattaatggcttcggactcaagtctgtattttgactctctcccttggtttcacattctgaaagaacaaatccaaaatgaaaatgttaacactactcaaaactgaagagctagtgcaaccctgaaactggccttgctgatgaaggtgcaaaatccctcaatgcacacgttggtgtgagctacagaagaacagaaccaccataactgtgtcaaacaactagatatcagaagataatgtttccagacaggaaggtgccaaggcaagctttaagagaaaggtgtaaactccagtttgaggtcacacccctgtgtggagtccacagaacagcagggaaacagcccagtggtgcctgagtcctgccctcccaggggtcctcatgtggacagagctgaaatacaggcccacataatgtgggtgccttgtggggcagacagcagcacttgggcaggcagggagaggtgtgagctattgtgagcaagtcggggtgtgccatctggaggccaacagacttgtacatgaggtaggggtggtggtgctgccacctctttgtggaaaataatttctttttttttttttttgagaaggagccttgctctgttatccaggctggagtgcagtggcacaatctcggttcactgcaacccccacctcctggggtcaagcgattctcgtgtctcagcctcctgagtaactgggattacagacgcacaccatcatgcctggctaatttttgtatttttagtagagatggggttttatcgtgtcggccagactggtcttgaactcttgacttcaagtgattcacccacctcggcctcccaaagtgctgggattacaggcgtgaaccatcggacctggccatgtggaagataatttcatgtggagaatgcagtggcaggaggaggggagggaaggacaagactgaaggtgcagaggggcatgatgggaatctgctgccaagtttaggccacagatgaggccttcaggagcagaagcatagatggcgggaaaggcaggggtggagactcttctgggagcaggtcgagcgctctgcaggctgattgtgtgtgagtgggtgggaggtaagaggtgctgaggacaacagtgattttttttttagatggagtctctgtcacccaagctggagtacagtggctactatcatagcccactgcagcctcaagctgcttggggctcatatgatcctcccgcctttgcctcccaaagtgctgggagtacaggcatgagccattgtgcctggctctaaacattattatattttattttacttagttatgcgtgtttctgagctttctatagtttcatggagcacagtcttctggaactcgttttcccgtcagcattatgtttttgagatccatcatgttgttgtacagcagttaatcattttcactgcagtatattccattaagttaaaataccatagtttatttatgtctattctgtttatgaacataattctttttttagagacggagtcttaccctgtcgcccaggctggagtgcaatgggacgagctcggctcactgcaacctctgcctcccgggttgaagtgattctcctgcctcagcctccccagtggctgggattacaggcacatgccaccatggctggctaatttttttgtatcttcagtagagacagggtttcaccatgttggccaggatggcctcaaactcctgacttcgtgatctacccacctcggcctcccaaagtgctgggattacaggcaggagccacggcgcccggtcctgaattcttttcaaatgtttttttaaatcatgaagcatgcttctgtgaagattctcctatgtttcctggtgcttacacacaaatgtccttgctgtatacatatgcaagagtgggaagtggtgaacataggaattcatgttttcgattttttttttcattttttttacctccattctctcagaatgtgatcatgttttcaatttcattggataatgccaaacttttccaaagtggctatgtgaatttacatccctattagctgccctgcatcctcacccacatgttatattgtcagatctttccattttttccattctgaaggtgtaacatcatgtcacagtggttttgatttccactttactgatgaataatgaggctgagcagttttcttatttattggccctttggttttcctaatctatgcagaaatttgtgcctacttttctttttgggtaattctgcgtctttttattctattcagaggaatttattaagtgtattgacaaattgaaacagtgagaatttaacagtttttttaataaaaaaatttaaattcactgtcttcagtttaatacaatttttttgagacagagtttcgttcttgttgcccaggctggagtgcaatggcacgatctcagctcaccgcaacctctgcctcccaggttcaagcgattctcctgcctcagcctcccaagtagctgggattacaggcatgtgccaccatgcccagataattttttgtatttttagtagagatggggtttcaccatgttggccagcttggtttcaaactcctgacctcaggtggtccatctgcctcggcctcccaaagtgctgagattacaggcatgagccaccacccccggcccagtttaatacaatttttaacatatctcattttagaaagtcactctatgtgggtttttttttgagacagggtctcactctatcacccaggctggagtgcagtggtgtgatcatggcttactgcaacctcaacctcctgggctcaaggaatcctcctgtctcagcctccatgtggctgggattacaggaatgcaccatcatgtctggctaatttttaattttattttgtagtgtggggtctcagtatcttgcctaagctggctatgtgttttttaaactgatagaagttttagttctttctttttttaatgtataagcctcatcttcatggaataaaagcctataggctaaagaaatagttactcatttacactgaaaagtattacttctattgtctgaagtttcacccggtgtggtggctcatgtctgtaatcccagcacttcgggagggcaaggtgggaggatcacttgaggccaggagtttgagaccagcttgcgcaacatggtgaaaacccgtctctacaaaaattagctgggcatggtggtgtacacctgtggttatagctactctcgggaagctgttgtgggaagaatgcttgaatccaggaagttcaaactggtgaaccgtgattatgccactgcactccagcctgggcaactgaatgagaacctgtctaaaaaaaaaaaaaaaaatttcctgaatgggcggcttctggactgatgccagggtaacaagattngacnaggatgtctttaataaataaaaaaccacaggcaaggcacaagttggctacaagcccggtaaaccccaaccattttttgggaaggctaagggccaggaggaattgcttgaaccccacggaatttgagaccagcttgggcaacacagcaagactctgtctttacantgcactccagcctgcngtnngnngacacacacacacactaaactaactgcataagagactactcgctcaatcatccatggcacgaaagcatcatatgactgcttgtgagacagaatcaagttgctgtgaaggccaaacttgcctgcaccttgcatccatactgtgcagaagctggacttcagccaagagtcacttgcttttagaataatggttttggttgttaagtataaagtagggaagtatgttttaagcatgacggaacaaataaaaggaaacaaaatgatttcaccgaaataaatgtttaattataaaaacccagtaatctctctaggcctactatggctcacaagaaaaggaaaaatgttttaaaaattaaaaacacaaaaagcccctccctggtgttttgtaccaattgtgtgagttgtttaacacgattcatagcaccgagtcgcctctacattcttgtaaaacattagtgttaacaccttcagagattgtactgaattaaaaagatcaggcatacacttaccccatggacaaaataaactgtcttgttgtgtacaggcagtaatgtggtcatatttgaagttgtccggaaaaaaaacacagagtcaaaatgactataaagaacacaaaacaaaagaaaaaaacaaaccggccgggcgcggtggctcacacctgtaatcccaacactttgggaggccaaggtggatcacgaggtcaggagatcgagaccatcctggctaacatggtgaaaccccgtctctactaaaaaaaacaaaaaaccaaaaaaacaaaaaacaaaaaaaattagctgggtgtggtggtaggcacctgtagtcccagctactcaggaggctaaggcaggagaatggtgtgaacccaggaggtggagcttgcagtgagccgagatggcgccacagcaatccagcctagctgaaagcgtgagactttatttcaaaaaaaagccaaaaacaaatgaacaaacaaacaaaaaaaaaccaaaacaaaccaaaagcaggaagctggcccacaagagagattcagggaagagaacagggttcagaaacatcccatttcatagatgaaaatggtggctccacatgtcaacaggaaaaggagatagtctttttttttttttttttttgagacaaagtctcgcttattgcccaaactgaagtgcagtggcacgatctcagctcactgcaacctcaacctcccaggttcaagcgattctcctgtctcagccttctgagtagctgggattacaggcgtgagccaccacacccagctaatttttgtatttttagtaaagatgaggtttcaccatgttggcctggctggtctcgaactcctgacctcaggtgatccgcccacctcggcctacttcaaagtgctgggattacaggtgtgagccaccgagcctggccaaggagactgtttaatagatgatgttggggaaaacagctatgtgtggacaaaataaaacagggatttttacgtaaccccaataccaatgtggagctgggatacagatgaaaaatacaaactataaaatccacaggagaaaatgaagcccatctcagtgaccttggaggagggaagaacttttttttgagacggagtctcactctgtcacccaggctggagtgcactggtgtgatctcggctcagtgcaacctctgcctcctgggttcaaggaattctcctgcctcagcctcctgagaagccaagattacaaccacccgccaccacgcctggctaatgtctgtatttttagtagaggcggggtgtcaccatgttggtcaggctggtctcaaactctgacctcaggtgatccgcccgcctcagcctcccaaagtgctgggactacaggcacgtgccaccacacccagctaatttttgtattttttggtaaagatgggggtttcaccatattggccaggctggtctcaaactcctgacctcaagtgatccgcctgccttggccttccaaagtgctgggcaaaacatgacgttaagatttaaaattactgaaaataattttgaaactatgacataagtaccttcctaatgtcttccccagtcattctgggaagtacccacatggcacccagggatgactatggaaagcatggcccatctgggtcctgaatttacatatagagagctcgttacagaggacagatgtgaagatgatgtctgacatttcccagcatattcaggaggcacagctggggcaaacagaactccacatatgtcgccaggcctcaccatggccatttgtttagagcccataattgaatggttctaagacctaagctcacagacaagttaaacaagcatcaaaaatatcacagaagcaacagttttatgaccttaaaacatctagcagagatatcctaaacctgtctgactagtagaccaaggagaacatgtgtaaattaatactgacaaccctgaagccactcctatcttaccaacaatttaaaaactggttttatttaccaaagattactaaagtcacatgaacttgaaaaatatttgggcttattaacttatgagcacttatttagaaatcaatttggtaccatgtagacaccatacacacacacacacacacacacacacacacacacacacataaaaaagattttatagctttgattttaaaattttagcaatgagataggtaaaactcactagtttaaaacaacagttggattcaaactttgaaaatgaaacaagttaaagtttatctgtcccacatgatcaaagcccttactgagttttagaggaaaaaagggtaacaaatttacatctcatagcacagagcaagaatttaagcttttttttttttttttttttatttgagatggagtctcgctctgttgcccagactagagtgtaatagtgggatctcggctcactgcaacctctgcctctcaggttcaagcaattctcctgcctcagcttcctaagtagctgggattacaggtgcccaccaacatgcctggctaatttttgtatttttagtaaagacggggtttcaccatgctggccaggttggtctcnaattcctgacctcaggtgatccacctgccttggcctcccaaagtgctgggattacaggcatgaaccactgtgccaagcccggaattaaattcttatttttttgagacagagtctcatgctctgtcccccaggctggagtgcagtggaacgatctcagctcactgcaacctctgcctcccgggttcacgccatgaatctgggagtagctgggactacaggcctcagcctcccgagtagctgggactacaggtgcatgccaccatgcccggctaattttttgtatttttagtagagacagggtttcaccgtgttagccaggatggtcttgatctcctgacctcgtgatccacccgcctcagtctcccaaagtgctggtattacaggcttgagccaccacgcctggccggttttgccttattttgtacatgggatacccagtacaacattatatggacatggggatggcgggcttctttgtcttgttctgagatgaaacagtgtgctttcagcacttcaccttaagtgtcaggttgagacacttcctttccacatttaggatgctttgttattttctaaatcatcaggtaactctcaaaacctgaatgtcctattaggaccaaatctggctaaccagtccctctggtcagggacagaatcactgcagccatgccctaacttcctctacatggctctgcacatcagcttgttgaaattcactgctatgctcacttccagccatgggctgccacctgattcagcaacccccagtctatagactcctttgccagataaggccagataaggttttactccaggtggaagccactccagtgagcggcacagtatgaactaggtccacagctttgctcaggacctgtttagccctcagtgagggaggggccagctctcctcactcacctgagtagtcactccacaggccctggctcttcttagcccccttcctgtccaggacccagggatcttcccctcgctccagctgggagattatgtcaggcttggatcctggaagtcctgctcgtggggagggaagtctttgtttacacaacatttacagagccccctccccctgcccaagccacttgtggggacatgaaaatggacaggactgatcttctgctggagctgagcacccagagaggtgatgagagcaaacctccaggaccagcctgtcccaggccccgtaccctgagaagcccccaccccagtccaatacgcagatacatagacgaggcctgctaaggtggcttacccaatgagactacattcccataggtttccatcatcacatttctgtagagacccctctgagcagggcacaggcggtcccattcatcctgggagaggagcacagccacatcctcgaaggtcagcttggcctgg

SEQ ID NO: 1070 - DNA, 258 bp, Homo sapiens; identical to SEQ ID NO: 1068

SEQ ID NO: 1071 - DNA, 9316 bp, Homo sapiens
aatcctagttacttgggagactgaggcacaagaaaagcttgaacctggggtgggggcggagactgcagtgagccaagatcatgccactgcactgcagcttgggcaacagagcaagactatctccacacacacatacaaaaagttttttaaatttatgtaatttctcactaatatataagctttttccttgtttcatacaaaacaggactccacacacttaggatggaaatccacacacttaggatttccaaccattttacatgatgcttgatgaaaatatctttttatatcactttatccatacaatactttagtcttttaagagaatactgaaaatagtccgactttcaaattttaagtgcaataattagtatggttaattgatatttaggaagggcatgtaatgttcttagaaaaagaactttatttggaatgtaagattttattgggataatggttcttatgccttaaattcccttagttcaaataaactaatgttaaagaattatggctgttttttaccaaaattctctacaattgtatgattactctccaacataacttcaagatgttgaggaaaataaaacaggtagtctctgaagtttttccacaggaacagcacgctaagtgcttctttctggagttattttgtgacactgaatcgccaaagaaaagcttcctatagagttaacagagacttctcttgggctgaaggctgcttgtggttccacatgcagtttctgtgagaatggattcttgtgtcagccatgggtcacaactttctgtgcactttctggtgctggattaggtggccatgctggttgaaggcacgcccacactccccgcactcatagggcttctcgcctgtgtggatccgctggtgctggatgagcactgagtactggctgaaggccttcccgcagctattgcactcatatggcttctcgcccgtgtgggtcctcaggtgcacaatcagagttgctttcaggctgaaggctttgccacattctgtgcactggaagggcttttcacctgtgtggattctctcatgctggatcagagaccggcgtgcactgaaggcgtgcccacattcaccacacacatagggcttctccccagtgtggactctctggtgctggatcaggtgtgagtgctgaacgaaggccttcccacattcgtagcatgcatagggcttttcctcggtgtggatccgctcgtgattcatcagtgtggagcggtggctgaaggtcttcccacactcactgcactcatagggcttctccccggtgtgcacgttgtggtgctgaatgaggactgagcggtcgctgaaggccttcccacactcgctgcacgtgtagggcttctccccggtgtggatcctctggtgctgcagcagtgtcctcttcacactgaaggttttcccacactcattgcacctgtgaggcttctccccagtgtgtaccctctggtggctccgcagaacagtgctatggttgaaggctttcccacacaacggacacacatatggcctttctcccgtgtggatccgctggtgctgaatgagatgtgagagttgagtgaaggctttccgacactcaagacattcgtgaggcttctctcctgtatgtatcttgtgatgctgagcaagatctgagctcactctaaaggcttttccacactcattacactcatagggcttctcacctgtgtgaattctcctgtgtttactaaggactgagctctggctgaaggccttcccacatacactgcacacatagggcttctctccagtgtggatacgctgatgctgaaggaggtgggaactccggccaaagcacttcccacactcaacacacatgtagggcctctctccactaggcactgcctggtgcggagtgagtggcatgctttggcttaagacctgaacttcacggtggtcaacagagtttggactcagacagaagctttgctttgtttcattattttcttgatcaatcctccccaagggtgttttccccagaatcactgtttgctctgaaattaatggcttcggactcaagtctgtattttgactctctcccttggtttcacattctgaaagaacaaatccaaaatgaaaatgttaacactactcaaaactgaagagctagtgcaaccctgaaactggccttgctgatgaaggtgcaaaatccctcaatgcacacgttggtgtgagctacagaagaacagaaccaccataactgtgtcaaacaactagatatcagaagataatgtttccagacaggaaggtgccaaggcaagctttaagagaaaggtgtaaactccagtttgaggtcacacccctgtgtggagtccacagaacagcagggaaacagcccagtggtgcctgagtcctgccctcccaggggtcctcatgtggacagagctgaaatacaggcccacataatgtgggtgccttgtggggcagacagcagcacttgggcaggcagggagaggtgtgagctattgtgagcaagtcggggtgtgccatctggaggccaacagacttgtacatgaggtaggggtggtggtgctgccacctctttgtggaaaataatttctttttttttttttttgagaaggagccttgctctgttatccaggctggagtgcagtggcacaatctcggttcactgcaacccccacctcctggggtcaagcgattctcgtgtctcagcctcctgagtaactgggattacagacgcacaccatcatgcctggctaatttttgtatttttagtagagatggggttttatcgtgtcggccagactggtcttgaactcttgacttcaagtgattcacccacctcggcctcccaaagtgctgggattacaggcgtgaaccatcggacctggccatgtggaagataatttcatgtggagaatgcagtggcaggaggaggggagggaaggacaagactgaaggtgcagaggggcatgatgggaatctgctgccaagtttaggccacagatgaggccttcaggagcagaagcatagatggcgggaaaggcaggggtggagactcttctgggagcaggtcgagcgctctgcaggctgattgtgtgtgagtgggtgggaggtaagaggtgctgaggacaacagtgattttttttttagatggagtctctgtcacccaagctggagtacagtggctactatcatagcccactgcagcctcaagctgcttggggctcatatgatcctcccgcctttgcctcccaaagtgctgggagtacaggcatgagccattgtgcctggctctaaacattattatattttattttacttagttatgcgtgtttctgagctttctatagtttcatggagcacagtcttctggaactcgttttcccgtcagcattatgtttttgagatccatcatgttgttgtacagcagttaatcattttcactgcagtatattccattaagttaaaataccatagtttatttatgtctattctgtttatgaacataattctttttttagagacggagtcttaccctgtcgcccaggctggagtgcaatgggacgagctcggctcactgcaacctctgcctcccgggttgaagtgattctcctgcctcagcctccccagtggctgggattacaggcacatgccaccatggctggctaatttttttgtatcttcagtagagacagggtttcaccatgttggccaggatggcctcaaactcctgacttcgtgatctacccacctcggcctcccaaagtgctgggattacaggcaggagccacggcgcccggtcctgaattcttttcaaatgtttttttaaatcatgaagcatgcttctgtgaagattctcctatgtttcctggtgcttacacacaaatgtccttgctgtatacatatgcaagagtgggaagtggtgaacataggaattcatgttttcgattttttttttcattttttttacctccattctctcagaatgtgatcatgttttcaatttcattggataatgccaaacttttccaaagtggctatgtgaatttacatccctattagctgccctgcatcctcacccacatgttatattgtcagatctttccattttttccattctgaaggtgtaacatcatgtcacagtggttttgatttccactttactgatgaataatgaggctgagcagttttcttatttattggccctttggttttcctaatctatgcagaaatttgtgcctacttttctttttgggtaattctgcgtctttttattctattcagaggaatttattaagtgtattgacaaattgaaacagtgagaatttaacagtttttttaataaaaaaatttaaattcactgtcttcagtttaatacaatttttttgagacagagtttcgttcttgttgcccaggctggagtgcaatggcacgatctcagctcaccgcaacctctgcctcccaggttcaagcgattctcctgcctcagcctcccaagtagctgggattacaggcatgtgccaccatgcccagataattttttgtatttttagtagagatggggtttcaccatgttggccagcttggtttcaaactcctgacctcaggtggtccatctgcctcggcctcccaaagtgctgagattacaggcatgagccaccacccccggcccagtttaatacaatttttaacatatctcattttagaaagtcactctatgtgggtttttttttgagacagggtctcactctatcacccaggctggagtgcagtggtgtgatcatggcttactgcaacctcaacctcctgggctcaaggaatcctcctgtctcagcctccatgtggctgggattacaggaatgcaccatcatgtctggctaatttttaattttattttgtagtgtggggtctcagtatcttgcctaagctggctatgtgttttttaaactgatagaagttttagttctttctttttttaatgtataagcctcatcttcatggaataaaagcctataggctaaagaaatagttactcatttacactgaaaagtattacttctattgtctgaagtttcacccggtgtggtggctcatgtctgtaatcccagcacttcgggagggcaaggtgggaggatcacttgaggccaggagtttgagaccagcttgcgcaacatggtgaaaccccgtctctacaaaaattagctgggcatggtggtgtacacctgtggttatagctactctcgggaagctgttgtgggaggattgcttgagtccaggaggttgagactggtgagccgtgattatgccactgcactccagcctgggcaacagagtgagagcctgtctaaaaaaaaaaaaaaaaagtttcctgaatgggcggcttctgacctgatgccagggtaacaagatagacaagatgtctttaataataaaaacacaggccaggcacagtggctcatgccggtaatcccagcatgttgggaggctgaggcaggaggattgcttgagcccaggagtttgagaccagcttgggcaacacagcaagactctgtctctacactgcactccagcctgaaaaaaagaaaacacacacacacactaaactaactgcataagagactactcgctcaatcatccatggcacgaaagcatcatatgactgcttgtgagacagaatcaagttgctgtgaaggccaaacttgcctgcaccttgcatccatactgtgcagaagctggacttcagccaagagtcacttgcttttagaataatggttttggttgttaagtataaagtagggaagtatgttttaagcatgacggaacaaataaaaggaaacaaaatgatttcaccgaaataaatgtttaattataaaaacccagtaatctctctaggcctactatggctcacaagaaaaggaaaaatgttttaaaaattaaaaacacaaaaagcccctccctggtgttttgtagcaattgtgtgagttgtttaacacgcttcatagcaccgagtcgcctctacattcttgtaaaacattagtgttaacaccttcagagattgtactgaattaaaaagatcaggcatacacttaccccatggacaagataaactgtcttgttgtgtacaggctgtagtgtggtcatatttgaggttgtctggaaaaaaaacagcgagttgaagtgacaacaaaatactcccttcaagagtggaaaatcctggccgggcatggtggctcacgtctgtaatcccagcactttgggaggccaaggtgagtggatcacttgaggtcagaagtttgagaccagcctggccaacatatagtgaaaccccgtctctactaaaaaatacaaaaattagctggacatggtggtgcatgcctgtagtccccactactagggaagctgaggcaggagaatcgcttgaaccccggagacaagaagttgcagtgagccgagatcacactactgcactccagcctgggggacagagtgaaactccgtctctcaaaaaaaaaaaaaaaaaaaaaaagagtggaaaatcctttcgttgctattacaacatgtaatttactgagttacaaacagcagggtcagggctgggcaggtgcacacacttatccatcctgaggaactgccaggacaagacaaaggcatatctactcctcgcttgctctgatgctagtggcagtgatccaggttgtggcaggtggcttctgtttctatgcacatcagtaatctaaaactcagtcccatcgtcctctgtggcctgtgttagaggtgaggggaccaggtgcttccatgaaaaaacttctcatctccaaccagccatgctcccagagaatttcacagtctctgtggtgtcaaatcaaagggcgctcaaaggcagtttaagctctccatcaggcgagtacatagctggacacaagggagcccaggactggtttggcagtggcagcaaaatgccctcctgtgttttcttgtctcctacagctgcagtcagtaagcagaagttctatgcaagatttccaagacatgatgatgtgtcttcttgtatagtcactggaaaattaaattcctctaaggctggcatgtaccttgttcctctgaggatatctgattttgcaggccagtaagaggtagactgtaatacctggtgccctatccacataaagctactttagaaataaggaggagctttcaaggggaaaaccaccacatctgaaatgctgaagctgatcagccaatggaggtgttgcccaaactgtccctactctccccaagtggggcacattatggcaggacaggctgactgaggttttcctaagactcagacgtcaccttactgaagtcagaggttctttgccttaagcaaccgcaaacatgaacttcagggttggatctatgcaccatctttctttttataattttctccatctaaaggtcttgtacatcttttgttagattaattcttggatgctttatattcctgatgctattataaatgttatcttttaaaatattacacctttgctggttgctgacaaatataaataaaacatttctggccaggtgcagtggctcatgcctgtaataccagcactttgggaggctgaggcaggtggatcacttcaggtcaggagttcgagactagcctggccaacatggtgaaatcctgtctctactaaaaatacaaaaattagctgggtataggggcatggacctgtaatcccagctattcgagaagctgaggcgtaagaattgcttgaacccagacggcggagcttgcagtgacccgagactcatgccactgcattccagcctgggcgacagagcaagactgtctcaaaaaaaaaaaaaaaaaaaaaaaaattgtatccagcaaaactggtaatttcccttgtgaattttaatcaatcattttccaggttgacaatcacataaactgcaaacaatgcttttttctttctaattcttatagctttggttttgccttatttttatttttatttttttgagacagagtctcatgctctgtcccccaggctggagtgcagtggagcgatctcagctcactgcaacctctgcctcccgggttcacgccatgaatctgggagtagctgggactacaggcctcagcctcccgagtagctgggactacaggtgcatgccaccatgcccggctaattttttgtatttttagtagagacagggtttcaccgtgttagccaggatggtcttgatctcctgacctcgtgatccacccgcctcagtctcccaaagtgctggtattacaggcttgagccaccacgcctggccggttttgccttattttgtacatgggatacccagtacaacattatatggacatggggatggcgggcttctttgtcttgttctgagatgaaacagtgtgctttcagcacttcaccttaagtgtcaggttgagacacttcctttccacatttaggatgctttgttattttctaaatcatcaggtaactctcaaaacctgaatgtcctattaggaccaaatctggctaaccagtccctctggtcagggacagaatcactgcagccatgccctaacttcctctacatggctctgcacatcagcttgttgaaattcactgctatgctcacttccagccatgggctgccacctgattcagcaacccccagtctatagactcctttgccagataaggccagataaggttttactccaggtggaagccactccagtgagcggcacagtatgaactaggtccacagctttgctcaggacctgtttagccctcagtgagggaggggccagctctcctcactcacctgagtagtcactccacaggccctggctcttcttagcccccttcctgtccaggacccagggatcttcccctcgctccagctgggagattatgtcaggcttggatcctggaagtcctgctcgtggggagggaagtctttgtttacacaacatttacagagccccctccccctgcccaagccacttgtggggacatgaaaatggacaggactgatcttctgctggagctgagcacccagagaggtgatgagagcaaacctccaggaccagcctgtcccaggccccgtaccctgagaagcccccaccccagtccaatacgcagatacatagacgaggcctgctaaggtggcttacccaatgagactacattcccataggtttccatcatcacatttctgtagagacccctctgagcagggcacaggcggtcccattcatcctgggagaggagcacagccacatcctcgaaggtcagcttggcctgg

SEQ ID NO: 1072 - DNA, 6511 bp, Homo sapiens
aatcctagttacttgggagactgaggcacaagaaaagcttgaacctggggtgggggcggagactgcagtgagccaagatcatgccactgcactgcagcttgggcaacagagcaagactatctccacacacacatacaaaaagttttttaaatttatgtaatttctcactaatatataagctttttccttgtttcatacaaaacaggactccacacacttaggatggaaatccacacacttaggatttccaaccattttacatgatgcttgatgaaaatatctttttatatcactttatccatacaatactttagtcttttaagagaatactgaaaatagtccgactttcaaattttaagtgcaataattagtatggttaattgatatttaggaagggcatgtaatgttcttagaaaaagaactttatttggaatgtaagattttattgggataatggttcttatgccttaaattcccttagttcaaataaactaatgttaaagaattatggctgttttttaccaaaattctctacaattgtatgattactctccaacataacttcaagatgttgaggaaaataaaacaggtagtctctgaagtttttccacaggaacagcacgctaagtgcttctttctggagttattttgtgacactgaatcgccaaagaaaagcttcctatagagttaacagagacttctcttgggctgaaggctgcttgtggttccacatgcagtttctgtgagaatggattcttgtgtcagccatgggtcacaactttctgtgcactttctggtgctggattaggtggccatgctggttgaaggcacgcccacactccccgcactcatagggcttctcgcctgtgtggatccgctggtgctggatgagcactgagtactggctgaaggccttcccgcagctattgcactcatatggcttctcgcccgtgtgggtcctcaggtgcacaatcagagttgctttcaggctgaaggctttgccacattctgtgcactggaagggcttttcacctgtgtggattctctcatgctggatcagagaccggcgtgcactgaaggcgtgcccacattcaccacacacatagggcttctccccagtgtggactctctggtgctggatcaggtgtgagtgctgaacgaaggccttcccacattcgtagcatgcatagggcttttcctcggtgtggatccgctcgtgattcatcagtgtggagcggtggctgaaggtcttcccacactcactgcactcatagggcttctccccggtgtgcacgttgtggtgctgaatgaggactgagcggtcgctgaaggccttcccacactcgctgcacgtgtaggggttctccccggtgtggatcctctggtgctgcagcagtgtcctcttcacactgaaggttttcccacactcattgcacctgtgaggcttctccccagtgtgtaccctctggtggctccgcagaacagtgctatggttgaaggctttcccacacaacggacacacatatggcctttctcccgtgtggatccgctggtgctgaatgagatgtgagagttgagtgaaggctttccgacactcaagacattcgtgaggcttctctcctgtatgtatcttgtgatgctgagcaagatctgagctcactctaaaggcttttccacactcattacactcatagggcttctcacctgtgtgaattctcctgtgtttactaaggactgagctctggctgaaggccttcccacatacactgcacacatagggcttctctccagtgtggatacgctgatgctgaaggaggtgggaactccggccaaagcacttcccacactcaacacacatgtagggcctctctccactaggcactgcctggtgcggagtgagtggcatgctttggcttaagacctgaacttcacggtggtcaacagagtttggactcagacagaagctttgctttgtttcattattttcttgatcaatcctccccaagggtgttttccccagaatcactgtttgctctgaaattaatggcttcggactcaagtctgtattttgactctctcccttggtttcacattctgaaagaacaaatccaaaatgaaaatgttaacactactcaaaactgaagagctagtgcaaccctgaaactggccttgctgatgaaggtgcaaaatccctcaatgcacacgttggtgtgagctacagaagaacagaaccaccataactgtgtcaaacaactagatatcagaagataatgtttccagacaggaaggtgccaaggcaagctttaagagaaaggtgtaaactccagtttgaggtcacacccctgtgtggagtccacagaacagcagggaaacagcccagtggtgcctgagtcctgccctcccaggggtcctcatgtggacagagctgaaatacaggcccacataatgtgggtgccttgtggggcagacagcagcacttgggcaggcagggagaggtgtgagctattgtgagcaagtcggggtgtgccatctggaggccaacagacttgtacatgaggtaggggtggtggtgctgccacctctttgtggaaaataatttctttttttttttttttgagaaggagccttgctctgttatccaggctggagtgcagtggcacaatctcggttcactgcaacccccacctcctggggtcaagcgattctcgtgtctcagcctcctgagtaactgggattacagacgcacaccatcatgcctggctaatttttgtatttttagtagagatggggttttatcgtgtcggccagactggtcttgaactcttgacttcaagtgattcacccacctcggcctcccaaagtgctgggattacaggcgtgaaccatcggacctggccatgtggaagataatttcatgtggagaatgcagtggcaggaggaggggagggaaggacaagactgaaggtgcagaggggcatgatgggaatctgctgccaagtttaggccacagatgaggccttcaggagcagaagcatagatggcgggaaaggcaggggtggagactcttctgggagcaggtcgagcgctctgcaggctgattgtgtgtgagtgggtgggaggtaagaggtgctgaggacaacagtgattttttttttagatggagtctctgtcacccaagctggagtacagtggctactatcatagcccactgcagcctcaagctgcttggggctcatatgatcctcccgcctttgcctcccaaagtgctgggagtacaggcatgagccattgtgcctggctctaaacattattatattttattttacttagttatgcgtgtttctgagctttctatagtttcatggagcacagtcttctggaactcgttttcccgtcagcattatgtttttgagatccatcatgttgttgtacagcagttaatcattttcactgcagtatattccattaagttaaaataccatagtttatttatgtctattctgtttatgaacataattctttttttagagacggagtcttaccctgtcgcccaggctggagtgcaatgggacgagctcggctcactgcaacctctgcctcccgggttgaagtgattctcctgcctcagcctccccagtggctgggattacaggcacatgccaccatggctggctaatttttttgtatcttcagtagagacagggtttcaccatgttggccaggatggcctcaaactcctgacttcgtgatctacccacctcggcctcccaaagtgctgggattacaggcaggagccacggcgcccggtcctgaattcttttcaaatgtttttttaaatcatgaagcatgcttctgtgaagattctcctatgtttcctggtgcttacacacaaatgtccttgctgtatacatatgcaagagtgggaagtggtgaacataggaattcatgttttcgattttttttttcattttttttacctccattctctcagaatgtgatcatgttttcaatttcattggataatgccaaacttttccaaagtggctatgtgaatttacatccctattagctgccctgcatcctcacccacatgttatattgtcagatctttccattttttccattctgaaggtgtaacatcatgtcacagtggttttgatttccactttactgatgaataatgaggctgagcagttttcttatttattggccctttggttttcctaatctatgcagaaatttgtgcctacttttctttttgggtaattctgcgtctttttattctattcagaggaatttattaagtgtattgacaaattgaaacagtgagaatttaacagtttttttaataaaaaaatttaaattcactgtcttcagtttaatacaatttttttgagacagagtttcgttcttgttgcccaggctggagtgcaatggcacgatctcagctcaccgcaacctctgcctcccaggttcaagcgattctcctgcctcagcctcccaagtagctgggattacaggcatgtgccaccatgcccagataattttttgtatttttagtagagatggggtttcaccatgttggccagcttggtttcaaactcctgacctcaggtggtccatctgcctcggcctcccaaagtgctgagattacaggcatgagccaccacccccggcccagtttaatacaatttttaacatatctcattttagaaagtcactctatgtgggtttttttttgagacagggtctcactctatcacccaggctggagtgcagtggtgtgatcatggcttactgcaacctcaacctcctgggctcaaggaatcctcctgtctcagcctccatgtggctgggattacaggaatgcaccatcatgtctggctaatttttaattttattttgtagtgtggggtctcagtatcttgcctaagctggctatgtgttttttaaactgatagaagttttagttctttctttttttaatgtataagcctcatcttcatggaataaaagcctataggctaaagaaatagttactcatttacactgaaaagtattacttctattgtctgaagtttcacccggtgtggtggctcatgtctgtaatcccagcacttcgggagggcaaggtgggaggatcacttgaggccaggagtttgagaccagcttgcgcaacatggtgaaaccccgtctctacaaaaattagctgggcatggtggtgtacacctgtggttatagctactctcgggaagctgttgtgggaggattgcttgagtccaggaggttgagactggtgagccgtgattatgccactgcactccagcctgggcaacagagtgagagcctgtctaaaaaaaaaaaaaaaaagtttcctgaatgggcggcttctgacctgatgccagggtaacaagatagacaagatgtctttaataataaaaacacaggccaggcacagtggctcatgccggtaatcccagcatgttgggaggctgaggcaggaggattgcttgagcccaggagtttgagaccagcttgggcaacacagcaagactctgtctctacactgcactccagcctgaaaaaaagaaaacacacacacacactaaactaactgcataagagactactcgctcaatcatccatggcacgaaagcatcatatgactgcttgtgagacagaatcaagttgctgtgaaggccaaacttgcctgcaccttgcatccatactgtgcagaagctggacttcagccaagagtcacttgcttttagaataatggttttggttgttaagtataaagtagggaagtatgttttaagcatgacggaacaaataaaaggaaacaaaatgatttcaccgaaataaatgtttaattataaaaacccagtaatctctctaggcctactatggctcacaagaaaaggaaaaatgttttaaaaattaaaaacacaaaaagcccctccctggtgttttgtagcaattgtgtgagttgtttaacacgcttcatagcaccgagtcgcctctacattcttgtaaaacattagtgttaacaccttcagagattgtactgaattaaaaagatcaggcatacacttaccccatggacaagataaactgtcttgttgtgtacaggctgtagtgtggtcatatttgaggttgtctggaaaaaaaacagcgagttgaagtgacaacaaaatactcccttcaagagtggaaaatcctggccgggcatggtggctcacgtctgtaatcccagcactttgggaggccaaggtgagtggatcacttgaggtcagaagtttgagaccagcctggccaacatatagtgaaaccccgtctctactaaaaaatacaaaaattagctggacatggtggtgcatgcctgtagtccccactactagggaagctgaggcaggagaatcgcttgaaccccggagacaagaagttgcagtgagccgagatcacactactgcactccagcctgggggacagagtgaaactccgtctctca

SEQ ID NO: 1073 - DNA, 102 bp, Homo sapiens; identical to SEQ ID NO: 1067

SEQ ID NO: 1074 - DNA, 1615 bp, Homo sapiens
ggggcctaggctttgtccacagtcccctgctcaagcgaaagcaacggacaagccgggcactgatgcacatcactgactggtacccgaccctggtgggtctggcaggtggtaccacctcagcagccgatgggctagatggctacgacgtgtggccggccatcagcgagggccgggcctcaccacgcacggagatcctgcacaacattgacccactctacaaccatgcccagcatggctccctggagggcggctttggcatctggaacaccgccgtgcaggctgccatccgcgtgggtgagtggaagctgctgacaggagaccccggctatggcgattggatcccaccgcagacactggccaccttcccgggtagctggtggaacctggaacgaatggccagtgtccgccaggccgtgtggctcttcaacatcagtgctgacccttatgaacgggaggacctggctggccagcggcctgatgtggtccgcaccctgctggctcgcctggccgaatataaccgcacagccatcccggtacgctacccagctgagaacccccgggctcatcctgactttaatgggggtgcttgggggccctgggccagtgatgaggaagaggaggaagaggaagggagggctcgaagcttctcccggggtcgtcgcaagaaaaaatgcaagatttgcaagcttcgatcctttttccgtaaactcaacaccaggctaatgtcccaacggatctgatggtggggagggagaaaactgtcctttagaggatcttccccactccggcttggccctgctgtttctcagggagaagcctgtcacatctccatctacagggagttggagggtgtagagtcccttggttgaacagggtagggagcctggataggagtgggtgggaataaaccagactgggatgcctgtgtctcagtcctgcctcctcacggacttgctctgtgacctcaggtgacccacatgagcttttagcctcagtttcctcatctgtaaaatgagctctaatgactttgtgactctttggtgtggccctggagcctggggccacggtggagttcctggccggccttgccacttgacaactcctttaaggcttcccccttaacacgggatccctgtggtggtgtttgggagttgcctggaggcaactccaagcctggcccccagctgaagcatggcaatctggctgctctctacagggacccccaagcgctgtgggtggagggcaggggtcgggggggttgaccttcttgggtcttcacatggcctaggccagtcctccggtcagactggtgtcaggcaccgtggtgcaaaattcctcttctggcccctccagtacccagagaaactggctgggccattaactgctgcagcaccaagggtggtagaaagagctgtgaagagcccccaaaccagtaccaggacacctgggttctcctgtgacctggggcacagttcttgccctctaggccttgatttccccacctgcaagtggggatgccagccctggctctgcctccttcatgaggctctggaagactggccaaggttgtggaggagcttgtgaacttgattaaagtgtcgtaacatggaagtga

SEQ ID NO: 1075 - DNA, 6186 bp, Homo sapiens
agaaaaatggaaaaaaaatttagtcaaaaaatattactggtataaagacatgaattcctctgtgaaagagtcttaggtacttgcagagggtgggagtaatgaccatggtcataaagatgtggcaaaaggaaatgtgaggttctgattcaaactgcccccaaatactaggtctgggcatcggcctccccactcatggggcagccaggcctcaatctgcctcttgtctctgcaggataatgaccgtgaacaggcatcagcaaactttttctgtaaaggtccagagagtaaatattttgagctttatggaccatagggtttcagttgcaactgcagtaaattctcaattaatgtcctcgttaggttcttagaaactgcaactttaagcgaaatgacgtacagtaagtccaagtaacgtcgtttcttgtaatgttgatgagaaactgccactgtagagtaaaagcagccgtagatggtatgtaaacaaatgagtatatctgggttccaataaagctttatggacactgaagttttgaatttcacataatttttctgtgtcacaaaatattattctttaaacatttttttcaaccatttaaaaatgtaaaagctggccaggcatggtggctcatatctgtgatcccaggactttggaagaccaaggagggaggattgcttggggccaggagttcaagaccagcctgggcaacatagcaagacccccatctctacaaacaaacaaacaaataaataatgtaaaaaccattcttagctcacaggctatacaaaaacaggcagtaggctggatgtggcctgtgggctgtagtttgctgactcctgatcccgaataatgagacctgaggatcagaaggatactaggtaggttgggtgcagtggctcatgcctgtagccccagcactttgtgaagctgaggcaggaggattgcttgaggccaggagttcaaggtcagcctgggcaacatagtgagacctcatttctattttaaaaattttaaaaattagctggggcctggattggtggctcacacctgtaattccagaactttggggggctgaggtgggaggattacttgagtctagaagttccagaccagcctgggcaacatagcaagaccccatatctacaaaaaaatgaaaaattagccaggtgtggtggtgcacctgtagtcccagctactcaggaggctgaggtaagcgaatcaattgagctgaggagtttgaggttgcaatgagccatgatcatgccactgcgctccagcctgggcaactgagggggaccctgtctcaaaaaacaaacgaaaattagctgggcatggtggcatgcacctgcagccccagctacttgggaagctgacgggggaggatcacttcagaccaggagtttgagactatagtgagccatgattgcaccaccgcactccagcctaggtgacagggcaagatgttgtctctttttttttttttttttttttttgagacggagtttcactcttttgcccaggctgaagtgaaatggcatgatctcagctcactgcaacctccgcccccccgggttcaagcgattctcctgcctcagtttcccaagtagctggaattataggtgcccactgccatgcctggctaatttttgtgtatttagtggagatggggtttcgccatgttggccaggctggtctcgaactcctgacctcaggtgattcacccgccttggcctcccaaagtgttgggattacaggcatgagccacctcgcctggccaagatgctgtctctttaaaacaaaaaaacaaacaaaaaagacagacacacaaaaggaatactaagtgttcatctgatttgagtctttacctgacctgtgaatctccattgaacattgtcagccatttcttgagtcctcagtaagatggaacttcacatctcactgggcaactcattccactgacagaagtttaaagctgtgtcatagttgtagtttcccccaaagcagatcacgagaaaaggattcaggtgccagaaatgtatttcggaaatgatcccaggaagcccagtgagagtgaaattaaccgagaaagggagaaaagccaataaaaaaggtgttgatgagtgagttaccactgggcaattgggtctccatccctcagggacccttagcgagactatagaaaatatttcagaagtgtcccacgaaaaggcagggagactggggtatatcctcgactctcatacctcattattgagggttgtcttgctaactgtctgctgtgcacaccctgaagccagaaaataacttaaagcagaagtgaaaggtagcccagggcatctggaaatgtctgcaggtaacctcgggtgagctgaggagtatgggtggggcacccatagtgtctccaacaaagtgtttctgactttgctttctaagatgtgcaactcataccacaaggggtcttgtgagatggctttggtgtggcacagagagagacatggtacccaagagcacaaagtctcagaatgggaaagggatttttcccttttgagctgtctctttgatcctgctctgcccgcctctcacccctggggctgccctctctccccagagcaggtgctccacccacgctggcctttcacttcctccaacttgtgggactgggactcttgcttctgactgcagccaacagaagtctgggcaaagtactagaatgctactgtaacacttgattgtctcctctttcattggaaagacagcagtcctccagttcagggcatttaagaggcaacagtaagtgtgaccatttaataacattgttaaaactgtaacaatctaataacattgtttgctgttatgtttatctttacagtttccacctgtacatggcttttcatgtatggtagtaatataacgtttcccttaaaataaatgtatataaatcgtgtgtccatttaaagaaaaatattaaataagagtatcaatggtatgaggatagaataaaatataataggccaggtgcagtggctcatgcctgtaatcctaatactttgggaggtacacgcagggaggtcacttgaagccaggagttggacaccagcctgggcaacatagtgagaccccatctctacaaaacattttaaaaattacctgggtgtagtgatgcatgcctgtaatccagctactcaggaggctgaggtgggaggatggtttaagcccaggagttcgaggttacagtgagctatgatcatgccactgcactccaggaagaccccaattatttaaaaataaaaatttatggagccgggtgcgatggctcacgcctgtaatcccagcactttgggaggccaaggagggctgatcacctgaggttgggagattgaaaccagcctgaccaacatggagaaaccccatctctactaaaaatacaaaattagccaggcacatgcctgtaatcccagatactcgggaggctaagggaagaatcgcttggacccgggaggcagaggttgtggtgagccaagatcgcgccattgcactctagcctgggcaacaagagtgaaactccgtctcaaaaaaataaaataaaaaataaaagaattttattagaaaaatatatatgtataaaatacccaccacttactgggtacttactaagtgctggatgctcttctaagcactttccatgcgtcattcaaatcattcaattaatcctcaccaatatgggttaagtactatttgaggtagggactctttgccccatgttactactgagcaaacaggcatagagaagttaaataacgtgcccaaagttatatagctaggaagtgatgagctggaaaataaacccaggtggtcctgctccagatttgtgctctaaattgcagaattatgctgcttctcataaatttcacacacacacacacacacacacacacacacacacacacacacaaaatgtgaaggtgatatttgaataactgaagttaggggaaaactgccctaaaaggttccccattttttctgtctccctgtatctactgccctttggttgccatactttttctttttctttatttttttatttttatttttatttttttgagacagagtctcgctctgtcgcccaggctggagtgcagtggcgcaatcttggctcactgcaagctccgccttcgggttcacgccattctcctgcctcagcctcccgagtagctgggactacaggcgcccgccaccacgcccggctaattttttgtatttttagtagagacggggtttcaccattttagccaggctggtctcaatctcctgacctcgtgacccgcccatctcggcctcccaaaatgctgggattacaggcataagccaccatgcctggccttttttttttttttttttaagaaagacaggatctcactctgttgcctaggctggagtccagtgttgtgatcatagctcactgaagcttaaactcctaggctctggccatcctcccacctcagcctccagagtagctgggggtacagacctatgagccaccatgcccagctaattttttttttttggtagaaacaggtctggctgtgttgcccaggctggtctcaaactcctggcctcaaatgatcctcctgcctcagcctcccaaagttctggaattacaggcatgagccaccatatatggcctggttggcatattttctttagagcctcagaagatcaatctattcccttttcatcaccacagttcttcagatatttgatgacagagaactggttggccttcccagatcttctgtgctctagattaaacattgccagttccttctactagtttctgttgcatgttcttggcctcttcccctccagcacagggcctcttctttattcttgtttcttcagcagaacctataaagttattttgttgtcgtagcacttttttttgcaggtttcccacagctcattccaggggctcagggtagggagggtgtgattggggtgactgacatggcaaagggcagcttgagagtgacatcaaaaaggggggccagctgtcaatcagggaaaagccccctagggccagcagtacagtgggctggaggctggtgaacctggttctctgcaggccagagatgaaggttctttagtgcacttggagctaaccaggctgaaaggggcggactaaccaaattcaccagagcctggtgaggaagccaggctgcaaatgtattaaatcacaagggaggctgggcacagtggctcatgcctgtaatcccagcactttgggaggccaaggtgggtggatcacctgaggtcaggagttcgagaccagcctggccaacatggtgaaaccccgtctctactaaaaatagaaaaattagccaggtggcacatgcctgtaatcacagctacttgggaggctgaggcaggagaatcagctgaacacaggagttggaggttgcagtgagctgagatcgcaccattgcactccagcctgggcgacagagcaagactctgtcaagaaagaaagaaagagagagagagagagaaagaaaaagagagggagtgagaaagaaatcacaaggggagaagcaactgcaaagcagtctgaaacctccatgctgacttgtcagcacactctttctcctgtgggaaagtcagaatctagttagaaggttggtttttgtggaatcaaagcaaggtgagcaaaatgagtgattttaatcaccaggaaaacctaagatatttgtaccctctgagggatacaagagtctagagtggcagcactgctagtataattgccccttcctgtgcttgtggtagaaatgtctgatcaatcactgcatcttttccttcctactgctccctgggccagccctaagattcttagcaagagagtattctggccctgtgcggtggctcatgcctgtaatcccagcactttgggagacaaaggcagaaggattgcttgagcccaggagttcaaaatcagccagggcaatatagtgacaccccatctctacaaaaaaatttaaaaatgagctggatgtgtgggcgagcacctgtagtctcagttacttgggaggctgggtgggaggattgcttgagcctgggagattgaagctgcagtgagctctgatcacaccactgcactccagcctgggaaacaaagccagattctgtcttaaatt

SEQ ID NO: 1076 - DNA, 6191 bp, Homo sapiens
agaaaaatggaaaaaaaatttagtcaaaaaatattactggtataaagacatgaattcctctgtgaaagagtcttaggtacttgcagagggtgggagtaatgaccatggtcataaagatgtggcaaaaggaaatgtgaggttctgattcaaactgcccccaaatactaggtctgggcatcggcctccccactcatggggcagccaggcctcaatctgcctcttgtctctgcaggataatgaccgtgaacaggcatcagcaaactttttctgtaaaggtccagagagtaaatattttgagctttatggaccatagggtttcagttgcaactgcagtaaattctcaattaatgtcctcgttaggttcttagaaactgcaactttaagcgaaatgacgtacagtaagtccaagtaacgtcgtttcttgtaatgttgatgagaaactgccactgtagagtaaaagcagccgtagatggtatgtaaacaaatgagtatatctgggttccaataaagctttatggacactgaagttttgaatttcacataatttttctgtgtcacaaaatattattctttaaacatttttttcaaccatttaaaaatgtaaaagctggccaggcatggtggctcatatctgtgatcccaggactttggaagaccaaggagggaggattgcttggggccaggagttcaagaccagcctgggcaacatagcaagacccccatctctacaaacaaacaaacaaataaataatgtaaaaaccattcttagctcacaggctatacaaaaacaggcagtaggctggatgtggcctgtgggctgtagtttgctgactcctgatcccgaataatgagacctgaggatcagaaggatactaggtaggttgggtgcagtggctcatgcctgtagccccagcactttgtgaagctgaggcaggaggattgcttgaggccaggagttcaaggtcagcctgggcaacatagtgagacctcatttctattttaaaaattttaaaaattagctggggcctggattggtggctcacacctgtaattccagaactttggggggctgaggtgggaggattacttgagtctagaagttccagaccagcctgggcaacatagcaagaccccatatctacaaaaaaatgaaaaattagccaggtgtggtggtgcacctgtagtcccagctactcaggaggctgaggtaagcgaatcaattgagctgaggagtttgaggttgcaatgagccatgatcatgccactgcgctccagcctgggcaactgagggggaccctgtctcaaaaaacaaacgaaaattagctgggcatggtggcatgcacctgcagccccagctacttgggaagctgacgggggaggatcacttcagaccaggagtttgagactatagtgagccatgattgcaccaccgcactccagcctaggtgacagggcaagatgttgtctctttttttttttttttttttttttgagacggagtttcactcttttgcccaggctgaagtgaaatggcatgatctcagctcactgcaacctccgcccccccgggttcaagcgattctcctgcctcagtttcccaagtagctggaattataggtgcccactgccatgcctggctaatttttgtgtatttagtggagatggggtttcgccatgttggccaggctggtctcgaactcctgacctcaggtgattcacccgccttggcctcccaaagtgctaggattacaggcatgagccacctcgcctggccaagatgctgtctctttaaaacaaaaaaacaaacaaaaaagacagacacacaaaaggaatactaagtgttcatctgatttgagtctttacctgacctgtgaatctccattgaacattgtcagccatttcttgagtcctcagtaagatggaacttcacatctcactgggcaactcattccactgacagaagtttaaagctgtgtcatagttgtagtttcccccaaagcagatcacgagaaaaggattcaggtgccagaaatgtatttcggaaatgatcccaggaagcccagtgagagtgaaattaaccgagaaagggagaaaagccaataaaaaaggtgttgatgagtgagttaccactgggcaattgggtctccatccctcagggacccttagcgagactatagaaaatatttcagaagtgtcccacgaaaaggcagggagactggggtatatcctcgactctcatacctcattattgagggttgtcttgctaactgtctgctgtgcacaccctgaagccagaaaataacttaaagcagaagtgaaaggtagcccagggcatctggaaatgtctgcaggtaacctcgggtgagctgaggagtatgggtggggcacccatagtgtctccaacaaagtgtttctgactttgctttctaagatgtgcaactcataccacaaggggtcttgtgagatggctttggtgtggcacagagagagacatggtacccaagagcacaaagtctcagaatgggaaagggatttttcccttttgagctgtctctttgatcctgctctgcccgcctctcacccctggggctgccctctctccccagagcaggtgctccacccacgctggcctttcacttcctccaacttgtgggactgggactcttgcttctgactgcagccaacagaagtctgggcaaagtactagaatgctactgtaacacttgattgtctcctctttcattggaaagacagcagtcctccagttcagggcatttaagaggcaacagtaagtgtgaccatttaataacattgttaaaactgtaacaatctaataacattgtttgctgttatgtttatctttacagtttccacctgtacatggcttttcatgtatggtagtaatataacgtttcccttaaaataaatgtatataaatcgtgtgtccatttaaagaaaaatattaaataagagtatcaatggtatgaggatagaataaaatataataggccaggtgcagtggctcatgcctgtaatcctaatactttgggaggtacacgcagggaggtcacttgaagccaggagttggacaccagcctgggcaacatagtgagaccccatctctacaaaacattttaaaaattacctgggtgtagtgatgcatgcctgtaatccagctactcaggaggctgaggtgggaggatggtttaagcccaggagttcgaggttacagtgagctatgatcatgccactgcactccaggaagaccccaattatttaaaaataaaaatttatggagccgggtgcgatggctcacgcctgtaatcccagcactttgggaggccaaggagggctgatcacctgaggttgggagattgaaaccagcctgaccaacatggagaaaccccatctctactaaaaatacaaaattagccaggcacatgcctgtaatcccagatactcgggaggctaagggaagaatcgcttggacccgggaggcagaggttgtggtgagccaagatcgcgccattgcactctagcctgggcaacaagagtgaaactccgtctcaaaaaaataaaataaaaaataaaagaattttattagaaaaatatatatgtataaaatacccaccacttactgggtacttactaagtgctggatgctcttctaagcactttccatgcgtcattcaaatcattcaattaatcctcaccaatatgggttaagtactatttgaggtagggactctttgccccatgttactactgagcaaacaggcatagagaagttaaataacgtgcccaaagttatatagctaggaagtgatgagctggaaaataaacccaggtggtcctgctccagatttgtgctctaaattgcagaattatgctgcttctcataaatttcacacacacacacacacacacacacacacacacacacacacacacacaaaatgtgaaggtgatatttgaataactgaagttaggggaaaactgccctaaaaggttccccattttttctgtctccctgtatctactgccctttggttgccatactttttctttttctttatttttttatttttatttttatttttttgagacagagtctcgctctgtcgcccaggctggagtgcagtggcgcaatcttggctcactgcaagctccgccttcgggttcacgccattctcctgcctcagcctcctcagtagctgggactacaggcgcccgccaccacgcccggctaattttttgtatttttagtagagatggggtttcaccatgttagccaggctggtctcaatctcctgacctcgtgacccgcccatctcggcctcccaaaatgctgggattacaggcataagccaccatgcctggcctttttttttttttttttttaagaaagacaggatctcactctgttgcctaggctggagtccagtgttgtgatcatagctcactgaagcttaaactcctaggctctggccatcctcccacctcagcctccagagtagctgggggtacagacctatgagccaccatgcccagctaattttttttttttggtagaaacaggtctggctgtgttgcccaggctggtctcaaactcctggcctcaaatgatcctcctgcctcagcctcccaaagttctggaattacaggcatgagccaccatatatggcctggttggcatattttctttagagcctcagaagatcaatctattcccttttcatcaccacagttcttcagatatttgatgacagagaactggttggccttcccagatcttctgtgctctagattaaacattgccagttccttctactagtttctgttgcatgttcttggcctcttcccctccagcacagggcctcttctttattcttgtttcttcagcagaacctataaagttattttgttgtcgtagcacttttttttgcaggtttcccacagctcattccaggggctcagggtagggagggtgtgattggggtgactgacatggcaaagggcagcttgagagtgacatcaaaaaggggggccagctgtcaatcagggaaaagccccctagggccagcagtacagtgggctggaggctggtgaacctggttctctgcaggccagagatgaaggttctttagtgcacttggagctaaccaggctgaaaggggcggactaaccaaattcaccagagcctggtgaggaagccaggctgcaaatgtattaaatcacaagggaggctgggcacagtggctcatgcctgtaatcccagcactttgggaggccaaggtgggtggatcacctgaggtcaggagttcgagaccagcctggccaacatggtgaaaccccgtctctactaaaaatagaaaaattagccaggtggcacatgcctgtaatcacagctacttgggaggctgaggcaggagaatcagctgaacacaggagttggaggttgcagtgagctgagatcgcaccattgcactccagcctgggcgacagagcaagactctgtcaagaaagaaagaaagagagagagagagagaaagaaaaagagagggagtgagaaagaaatcacaaggggagaagcaactgcaaagcagtctgaaacctccatgctgacttgtcagcacactctttctcctgtgggaaagtcagaatctagttagaaggttggtttttgtggaatcaaagcaaggtgagcaaaatgagtgattttaatcaccaggaaaacctaagatatttgtaccctctgagggatacaagagtctagagtggcagcactgctagtataattgccccttcctgtgcttgtggtagaaatgtctgatcaatcactgcatcttttccttcctactgctccctgggccagccctaagattcttagcaagagagtattctggccctgtgcggtggctcatgcctgtaatcccagcactttgggagacaaaggcagaaggattgcttgagcccaggagttcaaaatcagccagggcaatatagtgacaccccatctctacaaaaaaatttaaaaatgagctggatgtgtgggcgagcacctgtagtctcagttacttgggaggctgggtgggaggattgcttgagcctgggagattgaagctgcagtgagctctgatcacaccactgcactccagcctgggaaacaaagccagattctgtcttaaatt

SEQ ID NO: 1077 - DNA, 6191 bp, Homo sapiens
agaaaaatggaaaaaaaatttagtcaaaaaatattactggtataaagacatgaattcctctgtgaaagagtcttaggtacttgcagagggtgggagtaatgaccatggtcataaagatgtggcaaaaggaaatgtgaggttctgattcaaactgcccccaaatactaggtctgggcatcggcctccccactcatggggcagccaggcctcaatctgcctcttgtctctgcaggataatgaccgtgaacaggcatcagcaaactttttctgtaaaggtccagagagtaaatattttgagctttatggaccatagggtttcagttgcaactgcagtaaattctcaattaatgtcctcgttaggttcttagaaactgcaactttaagcgaaatgacgtacagtaagtccaagtaacgtcgtttcttgtaatgttgatgagaaactgccactgtagagtaaaagcagccgtagatggtatgtaaacaaatgagtatatctgggttccaataaagctttatggacactgaagttttgaatttcacataatttttctgtgtcacaaaatattattctttaaacatttttttcaaccatttaaaaatgtaaaagctggccaggcatggtggctcatatctgtgatcccaggactttggaagaccaaggagggaggattgcttggggccaggagttcaagaccagcctgggcaacatagcaagacccccatctctacaaacaaacaaacaaataaataatgtaaaaaccattcttagctcacaggctatacaaaaacaggcagtaggctggatgtggcctgtgggctgtagtttgctgactcctgatcccgaataatgagacctgaggatcagaaggatactaggtaggttgggtgcagtggctcatgcctgtagccccagcactttgtgaagctgaggcaggaggattgcttgaggccaggagttcaaggtcagcctgggcaacatagtgagacctcatttctattttaaaaattttaaaaattagctggggcctggattggtggctcacacctgtaattccagaactttggggggctgaggtgggaggattacttgagtctagaagttccagaccagcctgggcaacatagcaagaccccatatctacaaaaaaatgaaaaattagccaggtgtggtggtgcacctgtagtcccagctactcaggaggctgaggtaagcgaatcaattgagctgaggagtttgaggttgcaatgagccatgatcatgccactgcgctccagcctgggcaactgagggggaccctgtctcaaaaaacaaacgaaaattagctgggcatggtggcatgcacctgcagccccagctacttgggaagctgacgggggaggatcacttcagaccaggagtttgagactatagtgagccatgattgcaccaccgcactccagcctaggtgacagggcaagatgttgtctctttttttttttttttttttttttgagacggagtttcactcttttgcccaggctgaagtgaaatggcatgatctcagctcactgcaacctccgcccccccgggttcaagcgattctcctgcctcagtttcccaagtagctggaattataggtgcccactgccatgcctggctaatttttgtgtatttagtggagatggggtttcgccatgttggccaggctggtctcgaactcctgacctcaggtgattcacccgccttggcctcccaaagtgttgggattacaggcatgagccacctcgcctggccaagatgctgtctctttaaaacaaaaaaacaaacaaaaaagacagacacacaaaaggaatactaagtgttcatctgatttgagtctttacctgacctgtgaatctccattgaacattgtcagccatttcttgagtcctcagtaagatggaacttcacatctcactgggcaactcattccactgacagaagtttaaagctgtgtcatagttgtagtttcccccaaagcagatcacgagaaaaggattcaggtgccagaaatgtatttcggaaatgatcccaggaagcccagtgagagtgaaattaaccgagaaagggagaaaagccaataaaaaaggtgttgatgagtgagttaccactgggcaattgggtctccatccctcagggacccttagcgagactatagaaaatatttcagaagtgtcccacgaaaaggcagggagactggggtatatcctcgactctcatacctcattattgagggttgtcttgctaactgtctgctgtgcacaccctgaagccagaaaataacttaaagcagaagtgaaaggtagcccagggcatctggaaatgtctgcaggtaacctcgggtgagctgaggagtatgggtggggcacccatagtgtctccaacaaagtgtttctgactttgctttctaagatgtgcaactcataccacaaggggtcttgtgagatggctttggtgtggcacagagagagacatggtacccaagagcacaaagtctcagaatgggaaagggatttttcccttttgagctgtctctttgatcctgctctgcccgcctctcacccctggggctgccctctctccccagagcaggtgctccacccacgctggcctttcacttcctccaacttgtgggactgggactcttgcttctgactgcagccaacagaagtctgggcaaagtactagaatgctactgtaacacttgattgtctcctctttcattggaaagacagcagtcctccagttcagggcatttaagaggcaacagtaagtgtgaccatttaataacattgttaaaactgtaacaatctaataacattgtttgctgttatgtttatctttacagtttccacctgtacatggcttttcatgtatggtagtaatataacgtttcccttaaaataaatgtatataaatcgtgtgtccatttaaagaaaaatattaaataagagtatcaatggtatgaggatagaataaaatataataggccaggtgcagtggctcatgcctgtaatcctaatactttgggaggtacacgcagggaggtcacttgaagccaggagttggacaccagcctgggcaacatagtgagaccccatctctacaaaacattttaaaaattacctgggtgtagtgatgcatgcctgtaatccagctactcaggaggctgaggtgggaggatggtttaagcccaggagttcgaggttacagtgagctatgatcatgccactgcactccaggaagaccccaattatttaaaaataaaaatttatggagccgggtgcgatggctcacgcctgtaatcccagcactttgggaggccaaggagggctgatcacctgaggttgggagattgaaaccagcctgaccaacatggagaaaccccatctctactaaaaatacaaaattagccaggcacatgcctgtaatcccagatactcgggaggctaagggaagaatcgcttggacccgggaggcagaggttgtggtgagccaagatcgcgccattgcactctagcctgggcaacaagagtgaaactccgtctcaaaaaaataaaataaaaaataaaagaattttattagaaaaatatatatgtataaaatacccaccacttactgggtacttactaagtgctggatgctcttctaagcactttccatgcgtcattcaaatcattcaattaatcctcaccaatatgggttaagtactatttgaggtagggactctttgccccatgttactactgagcaaacaggcatagagaagttaaataacgtgcccaaagttatatagctaggaagtgatgagctggaaaataaacccaggtggtcctgctccagatttgtgctctaaattgcagaattatgctgcttctcataaatttcacacacacacacacacacacacacacacacacacacacacacacacaaaatgtgaaggtgatatttgaataactgaagttaggggaaaactgccctaaaaggttccccattttttctgtctccctgtatctactgccctttggttgccatactttttctttttctttatttttttatttttatttttatttttttgagacagagtctcgctctgtcgcccaggctggagtgcagtggcgcaatcttggctcactgcaagctccgccttcgggttcacgccattctcctgcctcagcctcctcagtagctgggactacaggcgcccgccaccacgcccggctaattttttgtatttttagtagagatggggtttcaccatgttagccaggctggtctcaatctcctgacctcgtgacccgcccatctcggcctcccaaaatgctgggattacaggcataagccaccatgcctggcctttttttttttttttttttaagaaagacaggatctcactctgttgcctaggctggagtccagtgttgtgatcatagctcactgaagcttaaactcctaggctctggccatcctcccacctcagcctccagagtagctgggggtacagacctatgagccaccatgcccagctaattttttttttttggtagaaacaggtctggctgtgttgcccaggctggtctcaaactcctggcctcaaatgatcctcctgcctcagcctcccaaagttctggaattacaggcatgagccaccatatatggcctggttggcatattttctttagagcctcagaagatcaatctattcccttttcatcaccacagttcttcagatatttgatgacagagaactggttggccttcccagatcttctgtgctctagattaaacattgccagttccttctactagtttctgttgcatgttcttggcctcttcccctccagcacagggcctcttctttattcttgtttcttcagcagaacctataaagttattttgttgtcgtagcacttttttttgcaggtttcccacagctcattccaggggctcagggtagggagggtgtgattggggtgactgacatggcaaagggcagcttgagagtgacatcaaaaaggggggccagctgtcaatcagggaaaagccccctagggccagcagtacagtgggctggaggctggtgaacctggttctctgcaggccagagatgaaggttctttagtgcacttggagctaaccaggctgaaaggggcggactaaccaaattcaccagagcctggtgaggaagccaggctgcaaatgtattaaatcacaagggaggctgggcacagtggctcatgcctgtaatcccagcactttgggaggccaaggtgggtggatcacctgaggtcaggagttcgagaccagcctggccaacatggtgaaaccccgtctctactaaaaatagaaaaattagccaggtggcacatgcctgtaatcacagctacttgggaggctgaggcaggagaatcagctgaacacaggagttggaggttgcagtgagctgagatcgcaccattgcactccagcctgggcgacagagcaagactctgtcaagaaagaaagaaagagagagagagagagaaagaaaaagagagggagtgagaaagaaatcacaaggggagaagcaactgcaaagcagtctgaaacctccatgctgacttgtcagcacactctttctcctgtgggaaagtcagaatctagttagaaggttggtttttgtggaatcaaagcaaggtgagcaaaatgagtgattttaatcaccaggaaaacctaagatatttgtaccctctgagggatacaagagtctagagtggcagcactgctagtataattgccccttcctgtgcttgtggtagaaatgtctgatcaatcactgcatcttttccttcctactgctccctgggccagccctaagattcttagcaagagagtattctggccctgtgcggtggctcatgcctgtaatcccagcactttgggagacaaaggcagaaggattgcttgagcccaggagttcaaaatcagccagggcaatatagtgacaccccatctctacaaaaaaatttaaaaatgagctggatgtgtgggcgagcacctgtagtctcagttacttgggaggctgggtgggaggattgcttgagcctgggagattgaagctgcagtgagctctgatcacaccactgcactccagcctgggaaacaaagccagattctgtcttaaatt

SEQ ID NO: 1078 - DNA, 337 bp, Homo sapiens
cagcacctggcctataaggtatctttaaacagaaacacacataaacaaaggttatgcattgatctgccaggcagaaggtggggttagaaaaagatgtttctggcagaaaggtcagcatgtacagagatagccaagagcttggcaaggccaggggactcaaggagagccagtgggcagggagtgtggtggtgaaagggagagaggctggggccaggcggctcagtgtcttgtgggcagctctcatttcatccgattagcacggtaatcctggcaggttggacaggatcatttccgcctttgagagatgatgaaattgacgttccatgctgttaaatga

SEQ ID NO: 1079 - DNA, 337 bp, Homo sapiens; identical to SEQ ID NO: 1078

SEQ ID NO: 1080 - DNA, 337 bp, Homo sapiens; identical to SEQ ID NO: 1078

SEQ ID NO: 1081 - DNA, 208 bp, Homo sapiens
ttgcaatggattttggtccattgatcataatgacatatgacatctatttcaacacttagtatgtggcaaacatggtgctttgtatgtattatcacttttactgcctacatcaacaacattatgatgtaggtggttctcttccctcagttttggagaacaggaaatggaggcacagaaagatgacataactagtctgaggatgtaggga

SEQ ID NO: 1082 - DNA, 340 bp, Homo sapiens
gtttcaaattacctgtattgcacaggccattttaatggaaagaaaattagcttaaagataggaagtgccttattagctcagtaaagccatggtctgttcaattaaagtgttaacaaatatttcagaggaaagaatgtttagggtcataaatgaattcaacacagttgttcctaagcacttactatttacctgggaatgtgtactgtgtttggtgctttgaagataaatgttatttacaaaacacctagctaataaaaccttgcttcagaatgctgtgtttgacatcaaagatctttatactgaactttatggttgacaaggtttaatttcatttaagtat

SEQ ID NO: 1083 - DNA, 447 bp, Homo sapiens
aaaaatattattgctccattggtaaatgtatttacccaaatgtgttatttcagacaatagcccaacttagcagtggcattaaatggaataaatgtgttcttttactgacacggtgtctaatttagaaactttggtgtttttggcaatcacaccgccttgatttaggtggcacagggatcagggattaaaatggctcttcccaagaggaaagtacacaagtttgacagcactgaaaacccaacacattggtgcatccggaaaatttatggttaagactggaaaagtctgaaaagttgcacggctctgtcatttattaatttagtggcatatgtaagatgtttttattttagaagactgatctaccacctctgaaaggatatgttttcaaactgctgtattttttttcgacgtgtaaaataaagatattctacacacaattttctaaaa

SEQ ID NO: 1084 - DNA, 446 bp, Homo sapiens
aaaaatattattgctccattggtaaatgtatttacccaaatctgttatttcagacaatagcccaacttagcactggcattaaatggaataaatctgttcttttactgatacggtgtctaatttagaaactttgctgtttttggcaatcacactgccttgatttaggtgggacagggatcagggattaaaatggctcttcccaagaggaaagtagacaagtttgacagcactgaaaacccaagacattgctgcatccggaaaatttatggttaagactggagaagtctggaaagttggacggctctgtcatttattaatttattggcctatgtaagatgtttttattttagaagactgatctacgacctctgaaaggatatgttttcaaactctgtattttttttctacgtgtaaaataaagatattctacatacaattttctaaaa

SEQ ID NO: 1085 - DNA, 446 bp, Homo sapiens
aaaaatattattgctccattggtaaatgtatttacccaaatctgttatttcagacaatagcccaacttagcactggcattaaatggaataattctgttcttttactgatacggtgtctaatttagaaactttgctgtttttggcaatcacactgccttgatttaggtgggacagggatcagggattaaaatggctcttcccaagaggaaagtagacaagtttgacagcactgaaaacccaagacattgctgcatccggaaaatttatggttaagactggagaagtctggaaagttggacagctctgtcatttattaatttattggcctatgtaagatgtttttattttagaagactgatctacgacctctgaaaggatatgttttcaaactctgtattttttttctacgtgtaaaataaagatattctacatacaattttctaaaa

SEQ ID NO: 1086 - DNA, 375 bp, Homo sapiens
cagacttggccttaggaaaggtaagtaaagtggcaggattgggcaagttattacaccaggtgatggtaagatgaggatagaaagagaaccttatgggtcaggcgtggtggctcatgcttgtaatcccagcactttgggagggagaggcgggtggattacctgaggtcgtgagtttgagaccagcctgaccaacatggagaaaccccatctctactaacattacaaaattagctgggcatggtggtgcatgcctgtaatcccagctatttgggaggctgagggagaatctcttgaacccgggaggcggaggttgcagtgagccgagatggcgccattgcactccagcctgggcaacaagaataaaactccatctca

SEQ ID NO: 1087 - DNA, 375 bp, Homo sapiens; identical to SEQ ID NO: 1086

SEQ ID NO: 1088 - DNA, 301 bp, Homo sapiens
ctaaggaaagggcctagggccaaggcaggctaaatgccactcgggtctttgttattgggcttttattattctgttggtctgttccaccaccccagtggatgttaataggccaaattttataaacattttgaataatttgccctgtaaaatgagttccttagtcactgtgaagctcttgagagacttcccaggttgatataatttttccagtaaggtttaactactgccattgctgtgacctatcaagaagaaggtgttaacccagtttgaaaacatgcaaatcataattagtacgtgctgg

SEQ ID NO: 1089 - DNA, 301 bp, Homo sapiens; identical to SEQ ID NO: 1088

SEQ ID NO: 1090 - DNA, 538 bp, Homo sapiens
aaaagtgtcagtacttatgaaattataaaacatttccttcctgatgaaactggattttaagagtaaaggatcacatcaatgttttatttccatagacggcccatgtttgtcttataccccaacaaatggctttattttctggctaaaatcctttgctttcatttgcggtgatttaaaaacactcaaatctaacgtgtgatttagagatgtgcttctcaaaatggaatgagctttgggggttctgttaaaatgcagattctggccgggcacagtggctcacgcctgtaatcccaacattttgggaggctgaggcaggcggatcaccctgaggtcaggaattccacaccagcctggccacatggtgaaaccccgtctctactaaaaatacaaaaattagccaggcatggtggtgcaaacctgtaatcccagctactcgggaggcaggagaatctcttgaacccaggaggtggaggttgcagtgagccaagatcgcgtcactgcattccagcctaggtgacggagtgagacactctctaaa

SEQ ID NO: 1091 - DNA, 15500 bp, Homo sapiens
tctcctgtgttcttgatggcatatttggtactgggaatggctctacttcatccagtcccaacattggagttttgggaattacaaaggtacacagatttttctaattaaatgattgggtttctaagcattggtccatttcattgatcgatctggccactgcaagttccaaatgggcgggcctctggttctaaaaaattacttctctcctttttttttttttttttttttttaagtgtttataatgcctgtttggaagtctctcttctcttgctggtccgggtagggaggcactcagtgctgtcattccatcatgcagtatagatatttataaagcactgactctgccaggccactgttcaaggcacttgggatacatcagtgaattaaaaagtggagtttacattctagcaatcaacaatcagcatactaagtccataaatgatgcattatgtcagccagtgacaagtactgggggaaacatgggacaggaagcttggggagagggtgatcaggtgacctgaacacagacctgaagggtggagggagggagcctgcaaataacctgggggagagcgttccaggccagggtgtggccagggccgagccctatcctggaagtggaaggtcagcaaggaggccagtgcgggtcagggagtcagagcaggtggggtctgccgggtaactggggagcaggttacacaggcaggcaggtaggtaggcagccacagactgcctgagtggaagggagtgctgcagggagcagcttggtcagatttttttttttttttttttttttttagggatcgctttgactgcagtgatgagaatagaccatggggggctgggcaaaaggtagaaatgggatcccaactgggaggtgtcactagttttaaattaagagatgacccaccattggccatggtatgttgtgaaactaagaccatgaaaattggttcaccatcctcgatggcctacgtctcacaggtctccctcactgaggacttggggtgagcccggaaaccttctagaactggttgacctctgtcaaattgggagggaggagtggatttcaaaagagctctcctttgccatgtaagattctataatcagataaagagaaaccagatactaagtttgattaaccttgattgcaaatccaggtgagagggagctgccaggcaggcacacacatgcctggtttgtttgttggtttccccaggttggcagggccctgccagagctcagcctgaggtgtgccaatggccccatctgcctgttgctccctgtatgggggatgtgagggaaggttgtctgaggggcgcttcctctagcgccatcctggaggtccttttgctacccatggtgagaagccagtgctgagcacagggagatgagggaaggatctcatgggcacagaatggggcctaagccatgccactcttcagccagtttgctgccatgagcttgcaggcatataactaatcccaaatctcaaataagatagccggccctctgtatctgtgggttctaccaacttcaattcaaaaatattgtttctgaactaatattgtttgtttctgtactgttctgggtgagcatgtacaaactttttgttgtcattattctctgaacaatgcagtctgacaacgatttacagagcaattacattgtattaaggattgtaagtaatgtcgagatgatttaaagtatatgggaggatattggctgggtacggtggctcacacctgtaatcccagcagtttgggaggccgaggtgggcagatcacctgaggtcaggagttcgagaccagcctggccaacatgttgaacccctgtctccactaaaaacacaaaaattagccaggcttggtggctggtgcccatagtcccagccacttgggaagctgaggcaggagagtcacttgaacccaggacgcagaggttgcagtgagctgagatcatgccactgcactccagcctgggtgacagagcgagactctgactccaaaataaaaaataaaaaaaaatatataaataaaataaagtatattggaggatgtgtgtaggctacatgcaaatactacaccattttatatcagggagttaagcgtctgtggttgttggtatctgaggcggggagagtggcggtcctggaactaattcaaggttccctagggacgactgtaggagtaaaattgttgtagatgaagggaatcttaggggaagatggtgtaacaagcctcctccttctgcacccctttaaaacacatcatcatataatgtggccaccaaggtagtttgggaaatcattccttttattaaaatttgaatggtgctagcttactctgacaagttaccttgccagcactttttaatgagctgatgtatcccaagtgcctagaacagtagcctggcagagcgggtgcttcataaatatctatattgcatgaaggaatgatggcacctgagtgcctccctacctggaccagcaaggtccatcattatcgttattatcattattgctatttaccccttagtttatttctaggaacagagcaagtactatctcgctggccgtcagatctctttgttggtgtccagaggaaggtcatttctccttgctgcattctgcaccaccgttgaagactttgtaaatccagaaacccagggtctattttaccaaggtcctagaggcagagccacagttcaggagggaggtgccaaggagattccagggaatggaccctgtgagaggggaagcaaaggtcctggggaagcaccgggaaggctgggattttagggctctatctctggtagttagaataaaacataataggtacttggtcaatattcattgaacacaagaatggcttagttgctgcatatattgttgacagcatcaaaggcagatcagtcttctggatgtcactttgctaccagatttagtttcaggtatccctggggccagtttggcccttcatacctaacaggcctgcccgaccctgccaggagtctttgcataggctgtttcctctgcctggatgctcttccactagcgaactcttactcacccctcaggaccatctccaacaaccctccccaactcttcagattttctcttccctgctgctgggctcccccaacagcagaacagcatagcagtgagattatttgatcaagcttgtgacttattcatctttgcattcacctgtcccagtctaacaagtcacaagcttgatcaaataattacatagttcctcgaaaatgtttgctgaagatagggccattagtaaatgaaagccttccttattccatagtaacagccaagcatgagtcgcttttgcttgatttgtcagtttgagtgatcttttccattgcttccctgccgtctgtggtgtggggcaggctagggacagtgagacagtgactgagtccagctgggcagccatctctcatgtgcacagcctcagatcaggctctgatgcgtaactggctgaccctggtcctttgagggttctgtgcagtggtcaacatgtcacacacagctgcaccagccacgtgtgcctggtgggcacttgagatgtggccggtgtacgtgaggaattgcgtttaaaattttgtctcattttacttaattaaaattgaagcaaccctcttctcctcactggggtcatacataaatccttgtggatactcccccaaacactctggaacctcctttacccagtttacatccttagggtgttttcctgcaagaggcagcacagagtaggggcccatagtgcaggattcctgagcctgatgccagcaccacctctcacgtgtggtgccgggaacccaggggataggcaggggcaaagtgtggcctttgcgttgagacacagagggccatcccaacccatgactggtgacagcaggctagacagaagctgctgggaggcagagatcaggagtagcagatatgccctacatggtgctatgagagcctataatgggggaatagtcctggagttgggatgcttttcagaggagcatttgggtgatgtttaaaaggatgcatctaggatctggctaggagggaaccacagggaagggtgtccaggtagacaggcccaggcctgcctggtgtgcttggaaagagcctgagaagtgggctttatttcatgagtaccagaggatgcaagcaggggaccagcctccccaatttcatgtgttagaaaggtgaccccgtggccccatggaatgggtgcaggaaaggccagtggcagcaggcccatgtgggcggctctcagatggctcagtgcgtgccagctaccattcaggcagttttatgcaggtcccgtttaatcctcaaaacaaaaccacgaggcttgtgtgtgactgagatgaagatcctgagactctagaggctacgggtcggcccgaccatacagtcagacgtgggccaggagaagagcccgcagtcaggctccagatgtcctcatccgtagccccttctcttttccacctctcacgggaagcgtgccgtgaggagaggaggttccagacatgtctgggggtttggtctgatttccggtgtggggaagttggcattgaggctgaagcactttgggggaaattgccttggtgacatgtggtgccgggaacccaggggataggcaggggcaaagtgtggcctttgcatttgagacacagacggccatcccaacccatgactgtgccagggcagtagagccctgaggcctgagtgcagggagtgtcaccaaggcttggagatgcagagggcggccctcagggtccccacagtggaggtgagaagagtgggctgaggaggaggtgaaggtagcgagccaggccatgggtatctctgctgtgtgttctttagtaacttacggtgattttgcatggagatgagtccctgtttcccagtctcctgtgtgttctgcaggtcggcagccgccgcgtgatacagtgcggagcagccctcatgctcgctctgggcatgatcgggaagttcagcgccctctttgcgtcccttccggatcctgtgctgggagccctgttctgcacgctctttggtaagactcccctctctggctttttcctttacttttccaaatttttaataggggtcatggtgtttttgctgactcccttcagtaagaaggtaacgataaatttctattttaaaatacaaaggatatgccttcaaaaaatgaaaacttttatcactctctgagttgaatttatattaaatatggaaccaacaataagatgtaattgtgctatgaacatttcaattaaatttaatctctttagtatttctgaccaatttaactcaaataccatccctctgaatgggctacttaaaactgaccattttgacagtgggactctgggtttgatctctgcaccatttagctgtaataaccagagacatgcaccagatatttaggtaggtctccctgtttaatcaaaatgtttgtgtagagagagaaccaatgtccttagttttctatttgacaaacaaaatgccacatggtgtttatgctcccgtaggagcccaaatagcgcgtacgccgagggtcatttggctcagagcgcagggtggctacagtctgaccccacacgtcccccttcctgtccctgcactggtctcattggtttctgttggacagagaaggggtgccagggagcctgccctcacctgccttgagctgtccccgctgtagtggtgctggagcttgtggtctggtttgtttttctccaggaatgatcacagctgttggcctctctaacctgcagttcattgatttaaattcttcccggaacctctttgtgcttggattttcgatcttctttgggctcgtccttccaagttacctcagacagaaccctctggtcacaggtgaggaaatgggctttacatcttggagtgggagctggaaccacagccgccagtccacacgcagctctttgcccattggagaggactttgggcctccaggagctgtggtgcagatgcgtctgtggatctctcttgaatctcacttttcaatacttacctggaagcgctgtgggcttcctgctggcgtgtacacataacagtcatggatgctaaggtctctttttcactgggaccctctcctttgggagaatgcctctctctaaatgcttttgatttcattagtctatcttaatagactaatgctccattaagataatttttttttgaaactcaacttcatagactttgaacacgttattctactatttgatgtctatcctattaactcctcagagcaaaatcacgtggcttgtgcattcaagattaacctttttaactcctccttttgttttaacactgcaatgtcctgaggaatgtagaaaggaagaaccgtctcaagacatagccattgctactggtaatatcttagccagtgcagaattgaggagtgtttgtttatacatatattttttgtgggtgaaattcacataacaaaattaactactttaagcagttcaatggcatctagtacagtgttgtgcagccatcacctctgtccagtttccaaaacatttcattaccccaaaataaaaccccaaactcattaagcagtaaatccccatcaccgcctgctcccacccgctggcagccaccggtgtgctttctgtttctatggattcacggtctattctaggtataaatagagtcataatatgtggctttttgtatctggcttccttcacttagcatgttttcaagattcatccatgttgtagcatgtagcagtacttcattcctttttttgagatggagtcttgctttgtcgctcaggctggagtgcaggcctgggcatgatctcagctcactgcaacctccgcctcctgggttcaagcgattctcctgcctcagcctcccaagtagctgggataataggcacccaccaccacacccggtcaatttttgtatttttagtagagacggggtttcaccatgttggccaggctagtcttgaactcctgacctcaagtgatccacctgcattggcctcccaaagtgttgggattacaggcgtgagccactgtgcccagcctcattccttttttatgactagataatgttcctttgtgtgtatataccataaattgtttatcgattcatccattgatggacatttgggttgtttccgccctttggctattgtgaatattgatgtgcaagtacaatcagttctcattattcatgaagttatgtttcgtagagttgccacaagcagtattagcaaatactgaaccattgctggggaaagacagtcagcaatgccacagctcatgcctggatggatcttctttaacacacaccatagccgccttatgtgtagaaacgtcagggagcacttcacaccacttggacattttaaacagtgagatcaccaacggaaagcacacggtatgacagacatggcactacatagtccgcaaaaaggactcttgtttacaggatgaggccagaacaaggcagagcgtcagcttatttgacatcagtcaggaatgtatgtggcgtggctcagatttttcactgctctgtatacccatgaaggcaccaagggtattcattttgggtttacaaatacattttagtgtatgggcaatttcacaaacacgtaattcatgaataatcaatgtgggccatatttgagtacttgttttcatttctcctgggtatatacctaagagtggaataattgggtcatgtggtaattctatttttaaccttttgaggaactgccaaactttttcatggcggctgcaccattttactatcccattagccatgtacgagggtttctgtttctccacatcctcaccagtgcctatgattttctgttgaggattattctatcttccggatggaaagtgtgtggataaatgagattcttgctgttttttacatttaatatgtcatattcatgggaggacatctttataaatccagttgcccctgattaaaagcagctaagcactaattgataacccaggatactgaaaagtcttctatgactgcaggtgccagaaatatttttgtcatcttattattcactttgtaattttttctcagccttatgactaccatttttttttatttagaattttttttatccaccgactacacccctgtggcttcacagttcgttgtagggtgaacaccactcttagattcatcttctatgcaccactgttgggaattctccttatggagatacctttggattattgttgaaagtattcatcgtagtttaaaacattactggcaaaaattcatctacatgtgcacaactaagaaatgtacactttcctttcctgctttgattggcggagttctgcccacaccattgccccttcccaagtcaagggcaggctcaccgctgctgtggcactgatcgtttatggctgtgttctctttctagggataacaggaatcgatcaagtgttgaacgtccttctcacaactgctatgtttgtagggggctgtgtggcttttatcctggataacaccatcccaggtacgtggtatatatcaaacacactttttttttttttattttttaacatatgtgttactttttttgccaaatagaaatggaaaacgggaagagtaaatgagttcaaagccatcactggttataactgttttctaaaacagttgtgatggcactcccagcctccatgtatgaatcagttttttgctacataaactgattaattttgtttctcgtgctgaaggacttttgggagacagcagctgagttcgctgcgtttggtgagatggcagtgggatgggcacaggccaggctcctgtccccctgcacagcctgtgccaaaggccctgcagtgtgggtttcatctgatctgagagaggtgggcacagcccgtggcacttctgcttggggagactgtcccttaaatgagttgttcctaaggtgggcttccagccaactaagaccagaaggcagtagaagaccatgggcaaaggctgagatcaggggtccaggatcattgacaagagatgcctggaggcagctgcctctccaatacccatgatccctgtttatggatacattctgtgctgagcttgggatgacagactaggatgttatgtgggtcctgccttggcggtggctgctgtgggccactgtaaagtgctgccatggacatactggcagatttccctgccttcaaggaagggtgatacttattcttaggctcaaaggttttgttgagattttcccctttaaacaacccatctccaaaaaaaataaaaaacctcaatcaagagattgctggggaaaccaaggcagaaggaatcacacacacaaatagatggaaggcactggatttaagagtccataacgactactctctttctctcctaagccagagggaattgagagagggatgcaacagtcaggctgatggaaattaaagtcagctttatttctgaaatactgatgagagagcagagcttagatataaaaaaaagtcatgagcttccttgctgagccctgtgtgctcagagcttcctccctgacccatctgtcagggtgcagagtggccaggagtgtccaaccggtggatgttcatccccgcagaagcacaacaggtacatgacctgtgtgtcccccatagcaccagacacgctaaaatggagcaaagcagcatgaagtgtgggtctgtctagatgggggggtgaatgtgcagtgactggttgatgaaggcattgtgtgatacaataaagattcagccctgttttgcaaactcagatttgcattttaaagaggtttttttttgactcagatttacattttacagagtttgttttgtgtgttttgttgtttgttttgttttgttttgttttgtttttaagacagagtcttgctctgttgcccaggctagagtgcaatggcatgatctcagctcactgcagtctctgcctctcgggttcaagcaattctcctgtctcagcctcctgagtagttaagattacaggcatgcaccaccacgcccagctaatttttgtattttgagtggggacgggatttcaccatgttggctaggctggtctcgaactcctgacttcatgtgatcctctcacctcggcctcccaaagtgcttggattacaggtgtgagccaccacacctggcctagagaggtagtttttgagcagacctggggcaggaggtgatgagccagaagactaggtaaccagatgggagaccgatagaatgaaccaggaaagcaataacatggcctgagctgggccctaacagtgaaaattgagaatatgggtcacatagaaggatagggaggtcagaaggtcattaggtgattgcttgaatgaggacatggaggggttagtgcttcttagacttctggtttgggcactggatagctgagcaccttcacctcctcaagtattctttgctgttatctaggcaggtttgatctgtgggaccatgtgtgtgtgtgtgtgtgtgtgtgtgtgtgtgtgtgtgtgtgtgtgtgtgtgtatgtgtttgacgacagtttcattttcagtagagctgctaaacgaagcattcctttgttctatcttgggatgtgtgacaggcactccagaggaaagaggaatccggaaatggaagaagggtgtgggcaaagggaacaaatcactcgacggcatggagtcgtacaatttgccatttggcatgaacattataaaaaaatacagatgcttcagctacttacccatcagcccaacctttgtgggctacacatggaaaggcctcaggaagagcgacaacagccggagttcagatgaagactcccaggccacgggatagcctttgctgtgccctgtggcctggccgcagtgaggcatgtatctgtagttccttgctgagtaacaagaagtaaaatacatgtttgtatatctacatttacattctgcgccccagagctaagacagactgcgaatcacttttctgctgtgagggtgatggtgcctgatgcggtgtctcgcctatctccttatttaagcccttaactccttgccctttgagagtgtccattgctggccatggtcactaaatttgaagttccagtcctccctttggagtggacatttaaaatctgcagccattccttgcttcagttcccttccaccacccagggctggctttcctataagccacctccagggtccaggggctttctctctctctccgaagcccctggacctgtttccttgtcatttgaccctcgtctgtgcccgcggagacctcctctgaccaaggggcactagtatgccttgcgctatcatgactgactggcccagtatgattctgttgtcgctgatctcccggaggaggaggctgttgacctgaaaacagtggcgtggctcccctgtgcccagatctggccatgggtgaggcctgcacagatgttgaatgaacatctgtttggggcattggagggaaaaggaaaggaccctgaagccaatatctgattctcggctgcaccttctcttggccaccctggccctgaccgggccagcacgtgcacactggcctcttttcatttcactagtggccgagacaccctctctggcatttatcactgttggccggtgtgatgagtatagagtgccacccaaggcaccagtcacacaagctgatgggcgtcttggctctgccgtcatgtggatgttattgtcgcgcgcgtctataattacaaggttttattcctatttaatgttattgactatagcagattttggaaatcagtgttttccatgtgaccctctttccttgcatccctattccttgtcccccacccactcttccccccatcaagaaaagaaccagcatttgtaaagctgtggacaccatcagggaagcttgttgtaacggcttttgaaggccagtaaccattgttgtggttgtgttttgtattgcttgataccatgaaagtgtaaatactgtaatgcctaatctatttatcaaaactgactactggaccggagcccagaaaccatgggtcaagttacacgtgaatttgttttgtgaagaagggaagctggggcaggtaacacgcagagccgccacgtggaacggtctgtccgccggtctgtcccgcttgccgggcttctgttgcaagtcttggcttaaggagacttcctgtgggttgccatgtcgcacgtccgttagatcttgattttacaggtgagggtggttgccaaaggtgataagaaaagcagccaacaggctccctctcacttaagagagttctaattaataacactaaattcttcctgagaaatgactcctcttggtttggtttgaagtttttcagtgaaggaaaaggcctgagataggaagcagtgccctcgcttcatgaggtggcacatcttcggtggccgttggcctggtcgagctttggtcagctgcgtgggtgcctgtctcctgtctccagcggcagggcatggttcttggcagcctggtgtccacacggtgcattcctgtccccctcggccccaggctggctcagctctccagtgctgcggcgctgtctttgcagcattgccatgtcaccgtagcccccttcactcttggaagtttggggcttcaaggtttattctggcaagaacacctcggagccactgcattgttttgccaaaaacttactgcagattaagtaaagaacttagatgctaaattacatctaattttgtatgtttttttaaatgtgtctttgatgcatactttagaagcacactggctcgcggtttccatccctcttgccttgggacactcttgaggctggcagccctcctgcaatgagttgctctcagttccttctgtttggattttgctcaacatctccagtttctctgctctgaaaaatggggaaaactgctaaacatcccagagatttgcaatcttctagctctccaggtgagcagaaagaccaaatatccaaataaaagcctgaaagccattggtgatccaggggcaccttctcttcagcttgactgggcgtcttccgctgcataacactcaaggtgtctgctctagtcatccagaaacccactcccttctgaagcccctccttgggccgggttgtatcaggaggattcaaccccgctaacatgtggggtgccctctgtaggccttcacacagggaaggaagccctaccctttcaactcctgttggagtgagagtttcctgttctgattccactgtggccaacccaataattctgtccgaggaggggtaagggaataggaggtggggagcaaagagggcagcctgactagatgcccctgctgaatctggtactttctgcacagccttgagtgattggagtcccctaatgactaataaacttgaacatgtaacacacacacacacacacacacacaccattttaggaagtggttctcctactggaaaatatgctacagaatgaaagtttgtaattgaaagaaaaagaatgtattcatctgcttcttgggtttaagcacacacctgaaggggagatattgggggacacggtggccactcgcggtctgtgtcatgacacttcccattcacatcattggcctgcgttgctggggctttgaaccaccaccccgtactttgttttgcctgtagagtgttgtaaaatattttggatgtgaatgtccttgcaggccggttagtctccagtttccacagagaccacctacccaccaccttcccaggtcacctgcctggtccctgaaagaaagcatttgtgtgggcaatcccaacatgaaatgtagacagcgtgaatacggacaggaggtgatgccatattcacagtgggggatggagggcccccacccctgcttcacagaataatgggaagtgactctagtctttgtaagcaattttcattctcattaggaagttaaatgtagattcacagatacatttactttcagaatcctcaagaggatttcaaatgctaacttttagtttcttgggattgatcaaggcaagagaagtggctttaaccatgccagccagaatgaagcatcatgggtcctgatggtttcccgttttcatggtaacaaattcgcacagaggttttgctttatgctgtagaataccgactttcatgatgacaacttggtttatgcatgaatattgcagtatttccatatagcaaaataacatttctacccaggataatagtcacagttttccagggagggaatgatataattttcatgacaatgtcatgtgatgatagaatttctccattgatgaatctctagtatgtgtgtatactttatttacccatacgtatattttatgaccatgagctaagttgttatttctttcattcatatccctgctgaaatattggtactagcaacttaaagttggcaagtctcatcttcagtaatacggatgccatgggagtggccaggccagattgaaggtgaatatggagcagtagcagaagcctcattccagaacccatctggccagagaagcagcagcatcctgggggatggccgtgcatggggtgtacactcgctataggcataggcccggcatggctgtcgctggacgccagctgtgcacacccagccacacctgctgcacgccgcgttagtgtgcggctccgggcctgagcattcgcaaagctcgcttctccagggagcctcctcttggctttggaaaagagcccagggacttaacgtgctgcctgttgtactctgtcccctcatgactttttagacacagggactaggacatcgaccaccctctgcccctcctgcagtcagaacccgagtagtgcaagaacggccacccggttttgccagcgttcagcgtctgcccatggacccataaggcacattagcgttgggggtctcttttcagcagcctcacagacattcccgtcctttctggttggtgttgactgtgtttcagcatcactctaccctcccatgtccttagcattgctgtgcgtgtttccaggcacttaggacacccttccccacgttgccatcttactgacagttcaaatgactctccttttttgttcgttagtaacaatcttcatttgacaccttaatacatttctgactgttcttaaaacagtggggatgcctatattttccttgagtttttgtgactgactttggctatatatacctttctggggttttgtttgttttttatttttattttgattaccgagggtatttggggtggggttgttttttgagatgtgtaattcttttatggagtttttaaaaagaattttcatattgtttttctaacatggcttcattaaacgtttaagtattttaaaaatatgtaatatttggaccagatgttgtgaataatagtagagataaagctattttattctgtatttttaaaactgttccgtacaaataaaagctctcctggacacagt

SEQ ID NO: 1092 - DNA, 349 bp, Homo sapiens
cagggtctcaccgtgttgcccaggctacagtgcagtggctattcagaggcacaatcgtaatgcaccacactcttgaactcctgggctcaagcaatcctcccacctcagcaccttgagtagctgagactgcaggtgtgcaccaccatacttggctatacagtgctatttctacattgcaaaaattacctgtttttttccctgtttccccacccaatcttggctgccacaatcggacagacagaaagcacaaggataccgtttgctctcccctgtagtggaaaccttagcagcaggcagtatgccccaggtctgtcaattagatacgttccaattgtccccaagggtaagc

SEQ ID NO: 1093 - DNA, 481 bp, Homo sapiens
aaatgtgttgccagtctcagaggaaactgtaaaataagtggagttttcgttgtcctggctttcttttctgcttctttttattgatttttaaattagcctaccccaatatcttccagggaatttttaaaaagttatctttctctctttcttgaggttcctcatatactctcactcacacgcacattttcacgagagcgaagtctacctttaactgaaatgaatgactgctgaatggtcaggaactccaagtccacatggaattcttgctcttcggtcccagactctcccttctgtgtcccccttaggcaggtgagcattctgtagtttgtagccacagctccacctggtttgggttttcttcctgtcattgccttattccagttaatcattacctagactagttgctaagctgaaaattcatgttgtggaatttcatattggataacatagttacttttcttgttttttaaacaatgctttc

SEQ ID NO: 1094 - DNA, 432 bp, Homo sapiens
ggataaacgctcataccttcaggactgtcaattcattttattagttatgtggtattagatgcatctcccttggtgcatactcttaattgttaatttaaagttccttgtagttttaattttaaaggacttatttggaatgttattacatttctctcattttgtaatcaccaacagaattttgccattgccagataatttaactagtgcaggaatttgactttgttatatactcatgaggggcaaattctttactgatcatttgatggttagctttgccagaagattaggagtattactatttcagtttcccaagatgataagtctttgaaagtggataagagaattgactcagtaaaggttacagccacaaagacagcaaaattgtaaaatcattctcattgctgataaaattgagtctttaaatgcatagtt

SEQ ID NO: 1095 - DNA, 3584 bp, Homo sapiens
gaaagtccctggaaggtgagtcctgaagaggaacaaaaacgtaaagacttgaggaaaagccatctcgtattcagcattgaccccaaaggttgtgaagatgtggatgacacactctcagtcagaaccttaaataatggcaacctggaacttggggtccacatcgcagatgtaacacactttgtggcaccaaattcttacattgatattgaagctagaacaaggtaatgctatttgaaatcagctctatggttgtgtgtatgtgactggatattttgtgtctgtactagtttcaggtgttcaaagatctcatgtttgtgcaattttgaaggtcccttccagaaaaaaaaagttgaggtccactctccattttcctttagaaaaacagtaccttgatcaatttacctttgctttttaacataaccttttcacacattgtttcctactaaatcgaaatgggttaaattttcatgtagtaatatactattttttaaaaatactggatcattacactccagtttttcttatacgacaaagattcatgtcacttgctctttctttctcttatcagtggaagaatattcagcccaaagcagtgtcacttagaaaagtgggaccatgggaatagttttattacccagtctgctgcactttatgaaacagcaacagccttggggaatctgtagtgagattttggccatttacctccctgcggcccacacagtcagcagttctgcttctccctgctaaaggtcgcgttgccgcgtgtgtgtcattcacagggccaccacttattatctagcagatcgtcgctatgacatgctgccttccgtcctcagtgcagatttgtgttcccttctgggaggcgttgataggtgagtttatggcttttgtcttcaaagcttgtcctggcccttctgtggctcctgatgctgcctgcttctggcctcatgtttcttctctgctatgccccaccccagccctgtgtctcccctctgacctctcaacctcacccccgaccccaaccccacaccacttatctttaggcagctttatttctctagccttccctgccctttccctcctctcttctgtctgctagcagtggggctctgcgtctccctctgttgctggctttttaaagtcagctaaaatctgagaacaaatgtatgtagctttgtgcttatgcattccctggcggaagttgtttggcatgaggatcatgaactcggggagttttttgtttgttcatttgttgagtttaaactttgtttctctttgaatagctaatagaatcatataggcccgaactcatatgtcccaagaggtatttaatgaaaggttcctccctatcactttccctcacttaccagttccgtattagtttttctagatataatacatacatgaatatgcatatgtgatcttttttacacaaatggttgcattttatatatatatactgtttagcaccttccttttaaaaaagaacttaatggtatcttggagatcattccgtattaataacagttgcactatctatggaaatttggatagtttccaatcttttggtattacaaacaaagctgtactgagttaactttgaacataagtcatttcacattttcatttttatttttattttttgagacagagtttcacatgttgcccaggctggtcttgaactcctgtgctcaagtgatccttccgccttggccacccaaaaagctgggattacagatgtaagccaccatgcccagaccatttcacattttttaaaatacagtatatgtgaaagagaaattcccatatttgattatgggatttctgtgtcaagagtatgtgcatttgtgtttagatcaatataatcaaattgcccttcttaaatgttacaccagttatattcctgtcaccaatgtatgagagtgcatattttcctatagccttgccaacacaatatgttgtatttttttatctttgccaatttgatagatgaaaaatggtatcttagattggttttaatttgcattacaaataaagctaaccattttttcgtatgtttgtcacttatgtatccctttctgttaactatattcttcgcccatttttcttttggattcaagatcaattactgattaatttgtaaaagctctttacatattaggaaaattagccctatgttttttatgagttccaaatgtataccttttttttaaataaaatgacttggtggcaaagagtttttttactaaatgaaatttttgctaatttatctgtcatcaagattgatatcacagttcagtgccatcctgtaggatttgcaagactttgctctaatttactgagctaaaaagacttgactctatcagtgtcatgcttttctaatcaaaatagaggacatggccgggcacggtggctcacgcctataatcctagcacttcgggaggccaaggcaggtggattgccagagctcaggagtttgaggccagcctgggcaacacagtgaaaccccgtctctactaaaatagaaaaaattagccaggcatggtggtgcacgcctatagtcccagctactcaggtggctgaggcaggagaatcacttgaaccaggaagaggtaggttgcagtgagccgagatcgcaccactgcactcccacctaggcaacagagcaagactccatctcaagaaaaaaatggaggacataaagtaaggtttgtaatgtcacatatgaactcatttcaaatttgttcagagctcaacagtccccagtctaactttgttgttttaatttaaaatattttttgatttagttgtaaggtggttggattgacaaaccagaaacctgtagctttgtaatttcttttaagttacagttaggtcaaattccacttgcttcaaaaatagaagacttaggtggggcatggtggcttacacctgtaatcgcagcactttgggcaggagaattgctcaagtccaggagattgaggcagcagtgagcagtgatcatgccattgcactccagcctgggtgacagagcaagatcctgtctcaaaaaaacaaaaaacaaaaaaagccagatgaatttgaatagtgatgttgtcaatgttactgtttttgtaggtatgctgtaagcatcatgtgggaactggataaagcctcttatgaaattaagaaagtgtggtatggcagaaccattattcgatcagcatacaaactgttctatgaagcagcccaagaactactggatggaaacttaagcgttgttgatgatattccagaattcaaagacttggatgagaagagcagacaagccaagctggaggagttggtgtgggcaattggaaagctgaccgacatagctcgccatgtcagagctaaacgagacggatgtggtgccctggaactggaaggggtagaggtttgcgtacagctagatgacaaaaagaacattcacgacctcatccccaagcagcccctggaagtccacgagacagtggctgaatgcatgatcctggccaaccactgggtcgccaaaaagatctgggagagcttccctcatcaggccttgctgcgccagcaccctcctc

SEQ ID NO: 1096 - DNA, 11185 bp, Homo sapiens
gaaagtccctggaaggtgagtcctgaagaggaacaaaaacgtaaagacttgaggaaaagccatctcgtattcagcattgaccccaaaggttgtgaagatgtggatgacacactctcagtcagaaccttaaataatggcaacctggaacttggggtccacatcgcagatgtaacacactttgtggcaccaaattcttacattgatattgaagctagaacaaggtaatgctatttgaaatcagctctatggttgtgtgtatgtgactggatattttgtgtctgtactagtttcaggtgttcaaagatctcatgtttgtgcaattttgaaggtcccttccagaaaaaaaaagttgaggtccactctccattttcctttagaaaaacagtaccttgatcaatttacctttgctttttaacataaccttttcacacattgtttcctactaaatcgaaatgggttaaattttcatgtagtaatatactattttttaaaaatactggatcattacactccagtttttcttatacgacaaagattcatgtcacttgctctttctttctcttatcagtggaagaatattcagcccaaagcagtgtcacttagaaaagtgggaccatgggaatagttttattacccagtctgctgcactttatgaaacagcaacagccttggggaatctgtagtgagattttggccatttacctccctgcggcccacacagtcagcagttctgcttctccctgctaaaggtcgcgttgccgcgtgtgtgtcattcacagggccaccacttattatctagcagatcgtcgctatgacatgctgccttccgtcctcagtgcagatttgtgttcccttctgggaggcgttgataggtgagtttatggcttttgtcttcaaagcttgtcctggcccttctgtggctcctgatgctgcctgcttctggcctcatgtttcttctctgctatgccccaccccagccctgtgtctcccctctgacctctcaacctcacccccgaccccaaccccacaccacttatctttaggcagctttatttctctagccttccctgccctttccctcctctcttctgtctgctagcagtggggctctgcgtctccctctgttgctggctttttaaagtcagctaaaatctgagaacaaatgtatgtagctttgtgcttatgcattccctggcggaagttgtttggcatgaggatcatgaactcggggagttttttgtttgttcatttgttgagtttaaactttgtttctctttgaatagctaatagaatcatataggcccgaactcatatgtcccaagaggtatttaatgaaaggttcctccctatcactttccctcacttaccagttccgtattagtttttctagatataatacatacatgaatatgcatatgtgatcttttttacacaaatggttgcattttatatatatatactgtttagcaccttccttttaaaaaagaacttaatggtatcttggagatcattccgtattaataacagttgcactatctatggaaatttggatagtttccaatcttttggtattacaaacaaagctgtactgagttaactttgaacataagtcatttcacattttcatttttatttttattttttgagacagagtttcacatgttgcccaggctggtcttgaactcctgtgctcaagtgatccttccgccttggccacccaaaaagctgggattacagatgtaagccaccatgcccagaccatttcacattttttaaaatacagtatatgtgaaagagaaattcccatatttgattatgggatttctgtgtcaagagtatgtgcatttgtgtttagatcaatataatcaaattgcccttcttaaatgttacaccagttatattcctgtcaccaatgtatgagagtgcatattttcctatagccttgccaacacaatatgttgtatttttttatctttgccaatttgatagatgaaaaatggtatcttagattggttttaatttgcattacaaataaagctaaccattttttcgtatgtttgtcacttatgtatccctttctgttaactatattcttcgcccatttttcttttggattcaagatcaattactgattaatttgtaaaagctctttacatattaggaaaattagccctatgttttttatgagttccaaatgtataccttttttttaaataaaatgacttggtggcaaagagtttttttactaaatgaaatttttgctaatttatctgtcatcaagattgatatcacagttcagtgccatcctgtaggatttgcaagactttgctctaatttactgagctaaaaagacttgactctatcagtgtcatgcttttctaatcaaaatagaggacatggccgggcacggtggctcacgcctataatcctagcacttcgggaggccaaggcaggtggattgccagagctcaggagtttgaggccagcctgggcaacacagtgaaaccccgtctctactaaaatagaaaaaattagccaggcatggtggtgcacgcctatagtcccagctactcaggtggctgaggcaggagaatcacttgaaccaggaagaggtaggttgcagtgagccgagatcgcaccactgcactcccacctaggcaacagagcaagactccatctcaagaaaaaaatggaggacataaagtaaggtttgtaatgtcacatatgaactcatttcaaatttgttcagagctcaacagtccccagtctaactttgttgttttaatttaaaatattttttgatttagttgtaaggtggttggattgacaaaccagaaacctgtagctttgtaatttcttttaagttacagttaggtcaaattccacttgcttcaaaaatagaagacttaggtggggcatggtggcttacacctgtaatcgcagcactttgggcaggagaattgctcaagtccaggagattgaggcagcagtgagcagtgatcatgccattgcactccagcctgggtgacagagcaagatcctgtctcaaaaaaacaaaaaccaaaaaaagccagatgaatttgaatagtgatgttgtcaatgttactgtttttgtaggtatgctgtaagcatcatgtgggaactggataaagcctcttatgaaattaagaaagtgtggtatggcagaaccattattcgatcagcatacaaactgttctatgaagcagcccaagaactactggatggaaacttaagcgttgttgatgatattccagaattcaaagacttggatgagaagagcagacaagccaagctggaggagttggtgtgggcaattggaaagctgaccgacatagctcgccatgtcagagctaaacgagacggatgtggtgccctggaactggaaggggtagaggtttgcgtacagctagatgacaaaaagaacattcacgacctcatccccaagcagccccggaagtccacgagacagtggctgaatgcatgatcctggccaaccactgggtcgccaaaaagatctgggagagcttccctcatcaggccttgctgcgccagcaccctcctccacaccaggagttcttttcagaactccgggaatgtgctaaagccaaaggcttcttcatagatacacggtattcctcttttgagggggcagaggaatggagtggcatgctgtatatttagttatcttacagttgttcttaaaatgtgacagccagatctttgaccaaaaagagaaaacagattcttggctctcctcatttttgaagacacatttttccctcttcattgttatgtatagagacttaaaacaagtttatttaggcataattttgttccttggttttttgtttcaatttttttttagatagagtcttgctctgtcacccaggttggagtacagtggtatgatctcggctcactgcaaccaccacctcccaggttcaagtgactctcctgcctcaggttcctgagtagctgggactacaggcacacgccaccatgcctggctaatttttttgtatttttagtagagacagggtttcgccatgttggctaggctggtcttgaactcctgacctcaagtgatccacctgcctcggcctcccaaactgctgggattataggcatgagccaccacactggacatttaggcataattttgacccactacaatttgggtttttttgttcggttggttttttttttttctttgagatagagtctcgctctgtcatccaggctggagtgcagtggcacaatcttggctcactgcaacctccgcctcccaggttcaagcgattctcttgactcagcctcctgagtatatgggattacaagcatgtgccaccacgcctggctaatttttgtatttttagtagagacagggtttcaccatgttggtcaggttggtctcaaactcctgacctcatgattcgcccgtctcggtctcccaaagtgctgggattataggcatgagccactgtgtgtggctgacccaccataatttgtaatacagaagtagggaacctgttagttacccttgatttaatttcatgtaccccttaagttacaaagaaataatcctatttatttcagtacttttaaaatgcagcatctttgtgacaatatcataagatactacaccaacagtgaatttataccaccctcaattgagtgagacatttttactccctatctctaggataaaatacttctttcattaaaaaccaagtataggcaggctgggcacagtggctcatgcctgtaatcccagtactttgggaggccgaggcgggcagatcacgaggtcaggagatcgagaccattctggctaacacggtgaaaccccatctccactaaaaatacaaaaaattagccaggtgctgtaatcccagctacttgggaggttgaggcaggagaatggcatgaacccgggaggcggaggttgcagtgacccaaaatcgcaccactgcactccagcctgggtgacagagcgagactctgtctcaaaaataaataaataaataaataaaaactaagtataggctgggtacagtggctcacacctgtaatcctagcactttgggaggctgaggcaggcacatcactgaggtcaggagttcaagaccagccttgccaacatgatgaaactctctctgctaaaaatacaacgagccaggcatggcgcactcttgtaatcccagctactcagaggctgaggtgcgagaatcgcttgaacctgggaggcagaagttgcagtgagccaagattgtgccactacactccagcctctgtatggtcactgtatgagctgtctgcatgccaggcacatgggacaagggctttcagacatcctcttggttaattcttaatgctgaggtgatggcagcatcattcatatttacagataagtcaattaagtctgaagagattaagtaatttgcctgtaatttaacagtcagggcagagccaagatttgaatccaagtctgttaaacttgcaagctcacatagtgaccacttaacaccttgcctctctgttcatcatcatgctctatttctcctttcccccttttcccttagccagccacaatataggactgaattatatgttattagttttatttttaatatacctctatatttcctggggctttgaaattattattttgaggctgtatgcagtggctcacacctgtaaccccagcactttgggaggccgaggcaggaggatcactgaaggccaggagttcaagactagcctgggcaacaaagtgagaccctgtctctacaaaaaaattattttgagaataaataaatagaatgcttactacctctttaaaaaagaaaaactaatttaggtttcttttacttgtacaccaagtccattattttacctatatatagaatgtttaaggttaaggatgtaaagaattcaattcaacgagtatttgaccacctattatagccaagcactaacttaacctagtattaaaatcagtacatgattcatttctacttaagaaatgtatttaaattctgacactcttgttttgtttaagccgtaaagcaaactagatttctgtagttgaaaagaggtgcttctgaaacgtgtccaaaacaaatttactggcagatgaaggtattcagacggatgagtgaagggttcccctcaaagtgttgtcttgtaaattactgtctgggactagctaacggtttttctgttctttgtcaggtccaataaaacactggctgattctctggataatgcgaacgacccccacgatcccattgtgaacaggctactgcgctccatggccacgcaggccatgtcgaatgctctgtacttctccaccggatcctgtgcggaggaggagttccatcattacggtgaatcataccatattcctatgtgtggctgtaactttgcgctagttattttaaaatagtttttgtttattttgatcttttgctttctttttgaaggtcttgcattagataaatatacccactttacttctccaataagaagatattcagatattgtagtacaccgcttgttaatggcagccatttcaaaagataagaaaatggaaattaagggaaatctgttcagcaacaaagatcttgaggaattatgcagacatatcaacaacagaaaccaagtaagagggaatttcaaaattctcttacctgtcatctcttgctaagaaaatatcagctttattgtgtagtaccgtgaagtatcatatattctagcaaattaaattctagaattattctaaccagtgctttcagaacatttgtagatgttctcaggtaacttgtggatttgggagatttgacggtagattatcagatttttttttttccgaaaggtggaaatgtaaagattcaagcaacgcataaagatatgatgacagaggccagacgtggtggctcacttgagggcggatcacttgaggtcaggaatttgagaccagcctggccaatatggtgaaaccccatctctacaaaaaatacaaaaattagccgggtgtgatggcacgcgcctgtagtcccagttacttgggaggctgaggcaggagaatctcttgaacccaggaggtggagattgcagtgggccgagatcacaccactgcactctagcctgggtgacaaaattgagactgtgtctcaaaaaaaaaaaaagatatgaagacagaaacatcacctgttatcttaccacccagagctaacaattaatgattctagacactgctaacatttttatttataaaaatatcggccagatgcggtggcttgcacctgtattcccagtactttgggaggctgaggcaggtggatcacgaggtcaggagatcgagaccatccgggctaacacagtgaaaccccatctctactaaaaatacaaaaaattagcatggtggcaggcgcctgtagtcccagctactcaggaggctgaggcaggagaatggtgtgaacccgggaggcggagcttgcagtgagctgagattgcaccactgcactctggcctgggtgacagagcgaaactccgtctaaaaaaaaaaaaatcacaccgtgcctgctgtttgaatctgcttttttcatgtaacccaactgttattgatagcacaccatgttatatcattgttttgaagctgctttctattctatttcatattactagttgctacaagattgcacagcatagaactagactattgggtaacgcaggaaattggaaactacctaaatgtttaatgtaattttctatatccaatggtatagttgtctgctgtgcaatgttgtagcactagccatgtggactacctaaatttaattaaaattagaagtagaaatttgtctcagtagaaatttggccagtgtctcagtcacactggccacattgtatagctcagtggccacttgtggttagtggctacatattaggcaacacagatagagagcatttctatcattgcagaaagttctgttgggcagcactgttctaagcaatcaaatttataaccatccttatggatacacttatacagacatttcagatgatttcctggaaaaattcctagaaatggaattgctgagccaaaaggtgtgcatgcacaaatgaaactgataggtcaggtgcagtggctcacgactgtaatcctagcacttttcgaggtcgaggccggtggatcacctgagttcaggagttccagagcagcctggccaacatggtgaaaccccgttactactaaaaatacaaaaattagccaggcatggtggtgcatgcctgtaatcccagctaatcgggcggctgaggcaggagaatcacttgaacccgggaggcagaggttgcagggagccaagatcgcgccattgcactccagcctaggcgatagagtgagactccatctcaaaaagaagacaaagaaactttaatacatattactaaattgtcttccttatcagtagtgctaatttagacttccaccaatagggttttcattggacaggcttgaaaagaaagaaaggctggccgggcgcggtggctcatgcctgtaatcccagcactttgggaggccgaggcaggcggatcacgaggtcaggagatcaagaccatcctggctaacacagtgaaaccccatttctactaaaaatacaaaaaattacccgggcgtgatggcaggcgcctgtagtcccagctactccagaggctgaggcaggagaatgacgtgaacccaggaggtagagcttgcagtgagccgagattgcaccactgtactccagcctgggtgacagagtgagactccatatctcaaaaaaaaaaagaaatgcaagtaagacatgtgtaatacttttcctgtacccaaggtgaacatgacccaaatttgctgatctctaatttcatgaactataaatgggtttcattttataaaataattcattttctaagacatttttgaggagataatactagatggttaagttcccacaaaaagtaatttaatttcatagtagagaacaatttttatattaatagttttacagaatctcacatttgaatgaatatgaatttcgtttctttggggaatgccaggggagtgttaaaatgctttggagttgtgcttcttacaggcagcacagcattctcagaagcagtctactgagctcttccagtgcatgtacttcaaagacaaagaccctgccaccgaggagcgttgcatatctgacggagttatttattcaattagaacaaatggtgtgcttctatttataccaaggtatgttacatctaatgcaatggtgcataagaaatcatagttaaaagtgtagaacacaaactgtacattagatataatttattaaaatatttaagcaactagttatcatatgtacataatgtaatgtataattcagtatataaatgtgaagattggaggccaggggtggctcacgcctataatcccagcactttgggaggccaaggtgggcggatcacctgaggtcaggagttcgagaccagcctggccaacatggtgaaaccccgtctctactaaaagtacaaaaattagccgggcatggtgacgcatgcctgaaatcccagctacctgggaggctgaggcaggagaatcacttgaacccgggaagcagaggttgcagtgagccaagatcgtgccactgcactccagcctgggcgacagagcaagactctgtctcaaaaaaaaaaaaaaaaagtgaagactggagtgtgtgtgtgtgtgtgtgtgtgtgtgtgtatatatatacacacacacttctatatccattttagggtctttcttatccagcaaaatactttgtttccatctgctaaggtgaaataaatacgtggaggtaaaccacaggaaaagtgatttgtttttaatctaggagaaaaactagtattctagataagcatacaagatctgtgtactaagaatacattgtctctggatttatattctggtcataatataggtttgggattaaaggtgctgcttatctaaaaaataaagatggtttagtcatctcatgtggcccagatagctgttctgaatggaaaccaggatcccttcaacgatttcaaaacaaaattacctctactacaacagatggggaatctgttacgttccatttgtttgaccatgtaaccgtaagtctgtgtttctattaagtattattaatattttaaatgtaaggaataaataatgtgatttagtaatatgtattttcttctctatgctaggtaagaatatccatacaggcctcacgttgccattctgatacaatcagacttgaaataattagtaacaaaccatacaagataccaaatacagaacttattcatcagagttcccccttgctgaagagtgagttagtgaaagaagtaactaaatctgtggaagaagctcagcttgcccaagaagtcaaagtaaacatcattcaggaggaatatcaagaatatcgccaaacaaagggaaggagcctatacacacttctagaggagatacgggacctagctctcctggatgtttcaaacaattatggaatatgagaggctcttacttcactaagagctgtcatatgtgaatgttttacagtcttttcaaacttaacatttaatgtgtgtcactcagtgctctagtcgatcaggactgggtagctatttcgcatatatgtaaaatgttctcagccgggcacggtggctcacgcctgtaaccccagcactttgggaggctgaggcgggcggatcacgaggtcaggagattgagaccatcctggctaacacggtgaaacccagtctctactaaaaatacaaaaattagcccggcgtggtggcatgcgcctgtagtcccagctacttgggaggctgaagcaggagaattgcctgaacccaggaagaggaggttgcagtgagccgagatcgcaccactgcattccagcctgggcaacagagcgagactccatctcaaaaaaaaaaaaaaaaaaaaaaaaagttctctcattcattaaagttgcattaaataaagtataattaggtcactatggaaacagagttttcagtaatgagtggacagtaagtggtggctctgcagatggcccctttctaataagtttaataaacccgaaattactggtta

SEQ ID NO: 1097 - DNA, 195 bp, Homo sapiens
gtattcctcttttgagggggcagaggaatggagtggcatgctgtatatttagttatcttacagttgttcttaaaatgtgacagccagatctttgaccaaaaagagaaaacagattcttggctctcctcatttttgaagacacatttttccctcttcattgttatgtatagagacttaaaacaagtttatttaggc

SEQ ID NO: 1098 - DNA, 689 bp, Homo sapiens
atttgtcaggtaattttcagtcactttcagataataagacttagtcctgagtccacttctccacttaaaaattcctatttcatatttgactcaacccttacctgctgtctccagtactagctgggattaggacacagggcgggtggtaggatgcacaggtaaagttctgtcacaggccttccttcccactctcccattttgatgaggtgcattggccttccccttgttggaaacttgttactttgccagcaaacaccccactagaaaaattaactctaggccgagcgcagtggctcacgcctataatcccagcactttgggagtccgaggcgggtggatcacaaggtcaggagttcaagaccagcctggccaagatgattaaaccccatctctactaaaaatacaaaaattggccagggacagtagctcatgcctgtaatcccagcactttgggaggctgaggggggtggatcacaaagtcaagagatcaagaccatcctggccaacatggtgaaaccccatctctactaacaatacaaaaattagccttgtgtggtggcaggtgcctgtaatcccagctacttgggaggctgaggcagagaactgcttgaacccaggaggcagaggttgcagtgagctgagattgcgccacagctctccagcctgggcaacagagcgagtctccatct

SEQ ID NO: 1099 - DNA, 197 bp, Homo sapiens
ctgggggagaggaaatgtatgcaactgtagtcccagctactggtggggtagcggggagttgggaggccaagggcagctgaggtgggaggatcacctgagcccaagaaggtcaaggctgcagtgagctgagcttgtgccactgcactcagcctgggcaacagtgagcaaagtgagacccccatctcgaaagagaattt

SEQ ID NO: 1100 - DNA, 197 bp, Homo sapiens; identical to SEQ ID NO: 1099

SEQ ID NO: 1101 - DNA, 171 bp, Homo sapiens
ccaattcagaatgcccaaatattctccatcctttgaggaagtgacttgcctcccattttcttcatgtagattgtttgtttttgtctctatatattcgtttagacacttgttgctcaaagcaatagaaacccagtttaaatggcttttaataaattgttttgagtaaccacc

SEQ ID NO: 1102 - DNA, 17252 bp, Homo sapiens
agactgccaatctggctgaagccaatgcttctgaagaagataaaattaaagcaatgatgtcgcaatctggccatgaatacgacccaatcaagtaagttcataaatattttatactaataggaacttttggggtgggttttcccccccaatcaaaagcactattttttcaaagtcctcgtatacatgtaattttttttcccccttttagttacatgaagaaacctctaggtccaccacctccatcttacacgtgtttccgttgtggtaaacctggacattatattaagaattgcccaacaaatggggtaagttcaaagcagaaactatggtatatcttactttttttcctttggaattgttccttagctatcttatttttcttggttaatactgccttctgtagacaatggcaaatgagcatggtctctggagccaaatttgccaggcttcaaatcttggttctggcacttggctgagtttgggcaagttacttgatctctataagcctgttttttcttctctaaaatggagataaaatagtacgtacttcacatagcagttacaaggattaaatgagatcacatatgtaaagcactacaagtaatatagtaagcactgtataacattagctaatttattaaataaagataactgctttttctcttcctcctcctcttcctttttcctctgaataggataaaaactttgaatctggtcctaggattaaaaagagcactggaattcccagaagtttcatgatggaagtgaaagatcctaatatgaaaggtgcaatgcttaccaacactggaaaatatgcaataccaactatagatgcgtaagtatgcaaattaggtatgacctgtggagactccagtcagtcccagggtatagtgttttaatcttgggcttgtaactttgctacttggattccttgagaactttgtataccaaagccattagtctctacatcttgcatttctgtgaggctgcagtctgctccatttaaagcaaatttaaaatggatttggggattttttgttaccagtgagtgccacttcccttgtagtcttctaattttttctttttctgtcattccctgctttcttcctcattcacatacatactcccacataatcttattatatatgctacttgcatttttaagtgaacaaaacagattgtaatcattttgagaaacaggaggcttaagaataaaagctctgcatgatgttgaggcaaatttaagtgtcaggcataaatgaaatactgaagtagcttgaataagtttggatatgccatgtgagtcttaagattctcaagtaaggtttattttataaaccactagttcagatcaactatagctctataaaacaccttaatgcctttttttttttttttttttttgagaccaagtctcgctctgtcccttaggctgaagtgcagtggcacaatctcggctaactgcaagctccacctcccaggttcacaccattttcctgcctcagcctcctgagtagctgggactacaggcgcccgccaccacgcccggctaattttttgtatttttttagtagagacggagtttcaccgtgttagcctgaccttgtgctccacccgcctcggcctctcaaagtgctgggattacaggcatgagccaccacgtctggcccttaatgcccatttttaatgtgtattcagattttatattatgaaccagtttttaatgaaatggacagacatgaaaattcagtggcagggttcaactagataacctcccattttatctgcttttattaatgtagtcagttacttttttgattaccttcaacagttgtgatctcacatactatacagcataatattaagtgttctttggactgctgttctctaactttgttgagcataagaatttcctacaaaagtatgttaaaaggctggccaggtagagggaccttgggcaaaaaaaaaaaagatcctggttgctccgcccccaattttgatttagaagttatgtgataagaccctgattctacatttttaacaggttgtccaagagattgtgaagttaggggatcctcagggcatcaatttacagaattaggtgttcatgttctcagtgaaaaaatacatacatatataagaacagttcctcagcttcatgctataaatattgttgaagtgtagtgtagtgagcaggtggggatgatgatgaaaatagctatgccatagaatgatattgaaaagatcttgtgtttttgaatatgtacttcagcaaatagtgttttcgttcacagataagaatgttttcctaaactcccaaccctgctcacttcctcaacttcacccccatctattttttatcagtcaccatcctgtgtttttgtggttcatcattgaacagtctgttgttatgctgtttctaattcagagacatttcatagatgtttccaaataactttagcttgaaattgattatttttacagacacaattaagagcagaccgcttcatctatattatgtaaaatttttaagtaaaaatttgtgttggaaaaattagtatcacctgtaaaccctaactaataattaacttcattgcttttgaatgctgaaatacaaatgcccaattgtgccagacacacagcaaatactggggaaagatgggaatctaaatattttaaatgaaactttcaccctcttcactaacaccactgataagcaactcagactcttcttctgtttctttttctatcctctgttctcctctttttttcttttttttttttttcttttttctctcttttgggcagtgggagactcctctttcacaaattgggaacaatggggcataagcaaattgatacttatttctggaatcgtggtgatgtctatggagcaactgcaacacaaataacacacctaaggtaccctactctgtacagccgagattctttcattttcagcattgagataaacacactctgttcctgaatgaaatagaaagggtttctctagggattcctgtgttttgcaaatttgcctgattacagagaagatgggggtgtagaagcagtggtgacaagtctgagaatagctatttttattttttaatactatatttaatgcccaacatttctgcaaaatgcatttctacaaaaaactggacctagaatgtctaatgaggtgttactttacatttttgtaacaccgattttgatcatttaagtcactaatgcttcttaattgactataaattgattaacctctcttaaaatactaataagtagatcatgggttttggtatctcattttattaattatttgtgtggtaatgacataatatttcccttgaactatctttccttaattgtataatgtcagtactaattttaatttcccgtcttgtggcatttactccaataccttcacaggtttgagagacttttgggttatggagaaggggagattttttgggatttttaattttaattttcatttttatttttttcaagaaacttgatagagtaggaaaaattgtgattatggtgttgtctaaattcaagtcttgtctttgtcacttaaatagaactttatggcacagaacatttcgctttatttctggccctcagttcttaagagtgacgggttctaagatccttttattgtttttgtagcatttctttgcttctttttgttatgcttgtttagacttttgtgtctttgtttagggttaggttgtacataattactcccttattttagaagatatggtgcttgtctaaactaatttggcattgcgctgaattatgtgttcccattatgttatagtagaacatgtagcatgagtactctgccttcttaacaatggtaaaacatgaaaactttcttttacagagaagcatatgcaattgggaagaaagagaaacctcccttcttaccagaggagccatcttcttcctcagaagaagatgatcctatcccagatgaattgttgtgtctcatctgcaaggatattatgactgatgctgttgtgattccctgctgtggaaacagttactgtgatgaatgtaagaagtgctgaatcttggaagatgtatattttagaatatttgtatttacttggaatggctcttcccaacctcatatgttttaataataaaataaataatgttgatgacaagtgttgatcaatgagcattaagtagtgagaagtctgtttttcttgctgtatcttttttaaacaataacctgtttgtccttttaaattctagaattgacttctgtaccttcatcagggtgactatactgaggtgtttttcttaatatagactttttgtttcctgtatgttttaagtggtatccagaattttaaaacttttttgggccttagataattctggaaatatttttaagtggtatctaaatctttttcctggattgtgaatagcttatcctaatatttctaagtgtattaacacctgattcctgtagacagtttttgttttttttttttttttttgagacagagtctcactgtctcccaggctggagtgcagtggtgtaatctcggctcactgcatcctctgccttctggcttcacacaattctgcctcagcctcccaagtagctgggactgcaggtgcccgccaccacacccggctaatgttttgtatttttagtagagacggggtttcactgtgttagccaggatggtctcgatctcctgacctcgtgatccgcccacctcggcctccccaagtgctgggattacaggcgtgagccaccgcgcccgacatctgtagacatatttattacccagcatttaccatgcagttgtgactttttaaatcacttatattagcacttagttgtttcctgccacttatcctaagtttgtgccttcttacacagaagaaatcagtgttacctgaaaatttgctcaagcctgctctggcctttttcatttttaaaggtagttttgaaatatacagtcctcatacacatggttctgcatctgcagattcaaaaccacagatcataaatatttgggggcaagaaaacagtaaaaaataatagtaaagactaatacagattttaaaataagagtataacaactatttacatagcatttatattgcagcaggtattacaagcaatctagagattatttaaagtatactggaggatgtacatagtattatatgcaaatactatgcctttggggcagttgagtgacttgagcatctacagacgttatcttcagagggttctggaacccatcccctttggatacctgtaaatctttattttttgacctcttcagtgaagaccaaggtcaagaagaggttgctaaagacttgtttcagattatatcttagatttaacataccacttggtattactggagttttactacattgaagcttaatcttcgtatctgtaatttagtgttgctcccacgtactgtgctgtaggtctctcatttccttgcctgaataaaaaccccaagttagccatgtaaaatttttgtctttctagactatcttatatttctcttttgttttctacaatattccagttactagctaaacaaagaatagtctttgagaaagagtgcttttgctctcaattcagacatttgtttaaaaaaaaaaaaagatggggtgggggatccttgctattttgccccaggctagccttgaacttctaggctcaagtgattctcctgtcccagcctccccaggagtggggattacaggcacatgccagcacacccagctgtgacttctttttagcgtagcataggtcatatagaaaagagcagaggagtactgtaagatgagagattttacttaagtttcttaatctaagaaatgattagcacgacatgcttggaaaacagtaatgtaactgaacaaatgtggaccatccttttaattcatttcgtaaacactttgagttcctactatgcttttattaatatttgaaatcttatacataggtataagaacagcactcctggaatcagatgagcacacatgtccgacgtgtcatcaaaatgatgtttctcctgatgctttaattgccaataaatttttacgacaggtaactgtctgtatccattttatgaaaaaattctttttaactgatttaactgtacttcagtgaatactgcataacatttttctgcattattatgcttggtatctgtaggctgtaaataacttcaaaaatgaaactggctatacaaaaagactacgaaaacagttacctcctccaccacccccaataccacctccgagaccactgattcagaggaacctacaacctctgatgagatctccgatatcaagacaacaagatcctcttatgattccagtgacatcttcatcaactcacccagctccgtctatatcttcattaacttctaatcagtcttccttggcccctcctgtgtctggaaatccgtcttctgctccagctcctgtacctgatataactgcaacagtatccatatcagttcattcagaaaaatcagatggaccttttcggtaagcctgtgtgtttttcactgttagaaaccaaatgaggtcaatgatgtagtgttttgttgttggttatcacttttaacagctttcttagtggaccactgtgctcagtaatgtgggatgacttgtaagaagtgacttagtcttattgggggaagaggaaaacaaacgtgattgatttggcaaatgaggattaagcatcctgaggtcaaatactacacaggttgccaaccagcccctattaaacgttgaatgttccatataccataacagctctgaacttaacagaggtgggagaattcacttgtgatcataatgatagttttggataggagtagttttgagtagaactaagaacagtttagataggtagagaagagggggtaaaaacacaggtaagtagagaagtcaggaatagtgattgttttggagcataattattatgtaggagaatagtgaaaactcacagcctaccacttcagaaatgagacttttgtccatgtagtttaatgtctcataaattctttaaaaaaaaaaaaaaaaggtgtaagaggcccatttcagacacactgaagcaaaatctttaggatgagacctttacatttacatttaagaaattccactgatctggtggaatttatttggttgatagtggaaataggcccagagagttctatggctgacccaagattatcctttcagtttagtggtagaactagagctaaaacttaactcttaatcctagggggatttttgtcttcataggccagactttgattttaagttttactattcttgcaactgatttctgtcataactgtagtatcttcttaaggaggtccttcattttacttttccacttactacatatagagaactcttcaaagtttcagccttctctcactttcctcagaagtattcatcatctttgacttaactcatcttaactgcaggtgatgggtaaacagcagcaaacttttttactcttaattgtccatttctgataatttttaatgtattataatttatgttttttaaagggattctgataataaaatattgccagctgcagctcttgcatcagagcactcaaagggaacctcctcaattgcaattaccgctcttatggaagagaaggtaaattttactggtgctttaatttgggattttttttacagcagggttttgtttttctggctttgttcttacctcttttttttttttttttttaactatttctgtttatttgtggttgtttctaaagggttaccaggtgcctgttcttggaaccccatctttgcttggacagtcattattgcatggacagttgatccccacaactggtgagtaagatcactttggtttagacctttttccctttaaaaaataattttagcttgatttaatgtgcaattttgtatttacctactgcttttattttttgtttctaggtccagtaagaataaatactgctcgtccaggtggtggtcgaccaggctgggaacagtgagtagatgtttacaataatcttcagatgattgcctgcaaactagataatggaaggtccaaactaggcaaactagataatggaaggtccaaactaggcagcgggtcgctgctctttattgtaaactttcatgtgccagattaacattttttatgtaaaatgtcaaaattcaagcttatatgagggttttttttaaatgagcaaatcttttctaaaatacaaaattttaaaagtttttttctactttcatatccaacaaatggggatcttgacaggacttcagtttaatgaatagataagaattacttgaaaagttattttaaatatggtggcagttattttcctagtaggtttaactttttctacccttaatttggatgatcaaagtttgatttgagtacataaatacataataagattaacgtctaccaaacaaaaattttttgtctgaaatcgagttgttcttgccaccctaaaatacaaagaactttgattttctctgtgggatattttatggcattaaaaatcagcagacttacttaatgtatttttagttatataattatttctgtttatataatccgattgaaaattgatatattcttaaaagtatgagttactagcaggatgtatcagtagaaggaacataggatttagaaacaggtagacttgggtttgaatcccatctccttcatttcctagctgcatgacagtggtcttgtggttttactccctaacatccatttcctcgtttggatttggaatgacactacctaccttaacatgtaaaatgacttcattgtgcccagcagacaaaagggctcttttccttgtatataacaataagttcacagagtaatttatagagtgctaattaaaatataatattacataaagtaatctattttgaggtctagttattgttatgatacagttaattggtgggggaaagttagttttaagtaaatataatatttactcagctctgtatccgaaacaaatttaagaactggggagtaggaaaaagttttcagagtagttaaaattggtgtcttaacagctatgcatggaaaggtcatgtattatacccatggagaaatacttgagcctatttttttttctcccacacagttccaacaaacttggctatctggtttctccaccacaacaaattagaagaggggagaggagctgctacaggtaggcatgctaaaaatcttggaaaataatcatcttattttttatatatatatctcaccaaagaaattaaagcacagcagtggcaggaaggaagggggtcatttgtttgtattgtgcttatccctcttaagtcctgggtagttgtccttaaagagggctagaaaagaataaattatatatagtatcttaaatgatggtttttaagacatttttaatattccttcccagtgattactttctccctgtcagcaaacagcagagtattggcttgcatttaccctcttggaagtagaagaaagtcaggggtcagacaatatctaagataccagtttaatttaagattaaagttaacaagctcagctcccaactgtgaacaagaattgcaactatttctcttctagaccccactgtcccaatcatctcccaccgtctcttttccaaaagaagagacaggagattgttagaggctcctgccctagtgggcgggtacaagcaatattaatctaagaagtaagaatcttactgtctaggtcaggggtccccaaccctgggccacagaccagtatccatccttggcctgttaggaactgggcaacacagcaggaggtgaacagcagctgagcgagcattaccacctgagctccacctcttgtcagatcagcagtggcattaagattctcataggagcatgaaccctgttgtgaactgcgtgtgcaaaggatctgggttgcacgcttcttaggagaatctaatgcctgatcatctaaggtggaacagtttttacccccctgcccccgtccatggaaaaattgtcttccacaaaacagctccctggtgccaaaacggttgagaactgctagtctaggtcataatcaccaccaggataaaggagcctccaaaacttcataacaagagttttggccaggcataatggctcatgctggtaattttagagctttgggaggctgatgggggaggattgcttgaggcctgaagttcaagattagcctgggcaacatagcaagactctgtctctaccaaaaaaataaaataaccagacatggtggcatgcacctgtggtcccagctacctgggaggctgaggcaggaggatcacttgagcttaggaagtcaaggctgcagtgagctataaccacatcactgcactttagcctaggggacagagtgagaccctgtctccaaaaagaaggaaattcgggatatcttctagtgcttcattgctaaacttatgaaagtttactatgtcattactggatcacattttaaaagaaggtaatagttattcatggctcactgaaaagatgcttaaaatctaaacccctactgttgctgttgtgtaccaattatttataatttaaagcacctctagtttaacagaagtaaccagttctgtttggtgaggcacaaattagaaacttagccaacactgttatttttacttaagcttttgagagaaagcgttgatattttcattgttaattatagaagttaaaactagaatttattctgctttgtatgatctttacccacttcctccctcaaaaaagaggttacaggagttggttttccttcatttaaacttttggggccaggtgtggtggctctcacctgtaaccccagcactttgtgcagatcacctgaggtcaggagtttgagaacagcctgcccaacatggtgaaaccctgtctctcctaaaaatacaaaaattagctgggcatggtggcacacgtctctagtcccagctacttgggaagctgaggcaggagaattcgcttgaacccaggaggtggaggttgcagtgagccaagattacaccactgtagtccagcctggacgacagagtgagactctgtctcaaaaaataaaaaataaatgaataagtaagcttttggggagagctaggtcatagcagcattaacctgtcagtgccttcaaaagacagtttaggaagtaacaggtagtaattagtggagtgataatcagtctgaacttcataaaagagaacttttaaatacaatatttccgtgtagagaaggtcctataaacttgcatcatctcagtcgagacatggccttaaaaattatgttgtagagttatttttacaaataaattgtactaatgttgctacactagttgaatagttggttctattccactgtttttaagtttgaaaataattatggatagaagagataagcttacttgtctcagatgactttagtttgaagaagtaatatcttggaatttatttttccagaagtataaaccgtgggcgacaccacagcgaaagatcacagaggactcaaggcccgtcactaccagcaactccagtctttgtacctgttccaccacctcctttgtatccgcctcctccccatacacttcctctccctccgggtgttcctcctccacagttttctcctcagtttcctcctggccagccaccacccgctgggtatagtgtccctcctccaggggtttcctccagctcctgccaatttatcaacacctgggtatcatcaggagtgcagacagctcattcaaataccatcccaacaacacaagcaccacctttgtccaggggaagaattctatagagagcagcgacgactaaaagaagagtatgtattctaatttgaaattattatacacttttttcattttctgataataacattaaataggtgtctggaaacgttttccagtgtttccagttagtatgagaaattcacctaaaatttaaaccaaagccatacaagcaacttctcagggattcctagtttatagttttaaagtggaaaactaatggcaatttcattcatttcattcatgatctaattacatttgtcttgttagttttcttaaatggtttttgttaactttcactctttaactttattttactagggaaaagaaaaagtccaagctagatgagtttacaaatgattttgctaaggaattgatggaatacaaaaagattcaaaaggagcgtaggcgctcattttccaggttagtgttttgcaagccttcacaacagaattacaaacgggactttgaatatccagggattagctatggatataaagaacattgcacttaggaatttttctgattcggtctaggtgtatagaagtgaagatgtagcttatttcccaatatctgttcattgaaataatgtctcagtgtaaattttattgtgtagaactaacagttgtggggattaaattgcccttgtcccttaaagttattcatagtatcaaataattgggaaatgtttttggaaggaaagaaataggggaatagccaaaaaacagttcccaggacccttttaccataaggctacagcttcttgctggaacattaacctgcgtaattatgaagtagtagtagaatacagatcgctttattgatagaaaaagtgaattataaaaattccctggaagtttgtttaaaagactttattttttagccttacacttgaaatgtggtttcttttaaaactaggctgttggccagtataggacaaaaaacagactcctacttcaatattcagataggaagtgaaatttaaaattaattgacattttgtttaatgttagttagctcatataactcacggtacattaatgcacttcactctaattgttaagacttcacttttgttttgtaacaagtgattgctccgatttgtgtactttattccattccagtagaggtcactgtgcctctttaatcatctaagatgaaatttgatataaagatagatgaaaccgtgaggaaagaatgctagaatctgagagtctgtgttttattttgtatgtatttctcaactatcaactattgttttgttttgtttttaggtctaaatctccctatagtggttcttcgtattcaagaagttcatatacttattctaaatcaagatctggttcaacacgttcacgctcttattctcgatcattcagccgctcacattctcgttcctattcacggtcacctccataccccagaagaggcagaggcaagagccgcaattaccgttcacggtctagatctcatggatatcatcgatctaggtcaaggtcacccccttacagacgctatcattcacgatcaagatctcctcaagcgtttaggggacagtctcctaataaacgtaatgtacctcaaggggaaacagaacgtgaatattttaatagatacagagaagttccaccaccatatgacatgaaagcatattatgggagaagtgttgactttagagacccatttgaaaaagaacgctaccgagaatgggagagaaaatatagagagtggtatgaaaaatattataaaggttatgctgctggagcacagcctagaccctcagcaaatagagagaacttttctccagagagatttttgccacttaacatcaggaattctcccttcacaagaggccgcagagaagactatgttggtgggcaaagtcatagaagtcgaaacataggtagcaactatccagaaaagctttcagcaagagatggtcacaatcagaaggataatacaaagtcaaaagagaaggagagtgaaaacgctccaggagatggtaaaggaaataagcataagaaacacagaaaaagaagaaaaggggaggaaagtgagggttttctgaacccagagttattagagacttctaggaaatcaagagaacctacaggtgttgaagaaaataaaacagactcattgtttgttctcccaagtagagatgatgccacacctgttagagatgaaccaatggatgcagaatcaatcacttttaaatcagtgtctgaaaaagacaagagagaaagggataaaccaaaagcaaagggtgataaaaccaaacggaagaatgatggatctgctgtgtccaaaaaagaaaatattgtaaaacctgctaaaggaccccaagaaaaagtagatggagaacgtgagagatctcctcgatctgaacctccaattaaaaaagccaaagaggagactccgaagactgacaatactaaatcatcatcttcctctcagaaggatgaaaaaatcactggaacccccagaaaagctcactctaaatcagcaaaagaacaccaagaaacaaaaccagtcaaagaggaaaaagtgaagaaggactattccaaagatgtcaaatcagaaaagctaacaactaaggaagaaaaggccaagaagcctaatgagaaaaacaaaccacttgataataagggagaaaaaagaaaaagaaaaactgaagaaaaaggcgtagataaagattttgagtcttcttcaatgaaaatctcgaaactagaagtgactgaaatagtgaaaccatcaccaaagcgcaaaatggaacctgatactgaaaaaatggataggacccctgaaaaggacaaaatttctttaagtgcgccagccaaaaaaatcaaactcaacagagaaactgggaagaaaattggaagtacagaaaatatatcaaacacaaaagaaccctctgaaaaattggagtcaacatctagcaaagttaaacaagaaaaagtcaaaggaaaggtcagacgaaaagtgactggaactgaaggatccagctcaactctggtggattacaccaggtagctgagtgtagggggtgggtgtggaactttgttgggagaaggattttcttcagttttatccatgcttgtgctttttatattaattatgaatgctgatctagggaagtaggctggttttatgtagtcttttgttgtctttgaagaagggaattgccaaagacaaggttgtaaatagattttgggggtgagccacatttgtgttgatacaatcataatcttaaattgtgtgtcttccttagggcagaataagttttttgttttttttaatgttaaaaggacatttgtgtttaagttagcatttttatatttatcagtgttttataattaatagtaaattcttcattaattaaaaatattttgttattctttttagtacgagctcaactggaggcagtcctgtgcggaaatctgaagaaaaaacagatacaaagcgaactgtgattaaaacgatggaagaatataataatgacaataccgcgccagctgaagatgttatcattatgattcaggttcctcaatccaaatgggataaagatgactttgaatctgaagaagaagatgttaaatccacacagcctatatcaagtgtaggaaaacctgctagtgttataaaaaatgttagtacaaagccatcaaatatagtcaagtatcctgagaaagaaagtgagccatccgagaaaattcagaaattcaccaaggacgtgagccatgaaatcatacaacatgaggttaaaagttcaaaaaactctgcatctagtgaaaaagggaaaaccaaagatcgagattattcagtgttggaaaaggagaaccctgaaaagaggaagaacagcactcagccagagaaagagagtaatttggaccgtctgaatgaacaaggaaattttaaaagtctgtctcaatcttccaaagaggctagaacgtcagataaacatgattccactcgtgcttcctcaaataaagacttcactcccaatagagacaaaaaaactgactatgacaccagagagtattcaagttccaaacgtagagatgaaaagaatgaattaacaagacgaaaagactctccttctcggaataaagattctgcatctggacagaaaaataaaccaagggaagagagagatttgcctaaaaaaggaacaggagattccaaaaaaagtaattctagtccctcaagagacagaaaacctcatgatcacaaagccacttatgatactaaacggccaaatgaagagacaaaatctgtagataaaaatccttgtaaggatcgtgagaagcatgtattagaagcaaggaacaataaagagtcaagtggcaataaactactttatatacttaacccaccagagacacaggttgaaaaagagcaaattactgggcaaattgacaagagtactgtcaagcctaaaccccagttaagtcattcctctagactttcctctgacttaactagagaaactgatgaagctgcttttgaaccagactataatgaaagtgacagtgaaagtaatgtttctgtaaaagaagaggaatcttcaggaaacatttctaaggacctgaaagataaaatagtggagaaagcaaaagagagcctggacacagcagcagttgtccaggtgggcataagcaggaatcagagccacagcagccccagcgtcagccccagcagaagccacagtccttctggaagccagacccgaagccacagtagcagtgccagctcagcagaaagtcaggacagcaagaagaagaagaaaaagaaggaaaagaaaaaacacaagaaacataaaaagcataagaagcataagaaacatgcaggcactgaagtggaattggaaaaaagccaaaaacacaaacacaagaaaaagaagtcaaagaagaacaaagataaagagaaggagaaggagaaagatgaccaaaaagtgaaatctgtcactgtgtaaaaagacagattttttaaattgacttaattactaagtcatctgtattaaattttgttataatgtaaagagattcaagccttgtaaataatgacatggaagaccctgtgctgcacttaaaatattgctgcttgattatttgatttttacatcagagctttataacacgaacttttgtacagaattgtgagttgtgaccatgtaacatgagaggttttgctagggcctattatttttaaccaccattaattagttggggtggagtttactgtaatgtgaaattttcacatttgaattttttaattgcctggcaaaagctgatataagttctaaaatatcagcagaatgatttgctgaattcattacaaccctgttatgtcactttttgattacaataaaagttttcagtaaacttttcaaa

SEQ ID NO: 1103 - DNA, 2196 bp, Homo sapiens
gtctcactttttttttttttttttaattgatgattcttgggtgtttctcgcagagggggatttggcaggatcgtaggacaatagtggagggaaggtcagcagataaacaagtgaacaaaggtctctggttttcctaggcagaggaccctgcggccttccgcagtgtttgtgtccctgggtacttgagattagggagtggtgatgactcttaacgagcatgctgccttcaagcatctgtttaacaaagcacatcttgctccgcccttaatccatttaaccctgagtggacacagcacatgtttcagagagcacagggttgggggcaaggtcatagatcaacagcatcccaaggcagaagaatcttagtacagaacaaaatggagtctcctatgtctacttctttctacacagacacagcaacaatctgatttctctatcttttccccacatttcccccttttctattccacaaaaccgccgtcatcatcatggcccattctcaaggagctgttgggtacacctcccagacggggtggcggccgggcggaggggctcctcacttcccagaaggggcggccgggcagaggcacccccccacctcccggacggggcggctggccgggcgggggctgccccccacctccctcccggatggggcggctgccgggcggagacgctcctcacttcccagacggggtggctgccgggcagaggggctcctcacttctcagacaggggcaggctgccgggcaggaggggctcctcacttctcagacggggcggactgccgggccggaggggctcctcacttctcagatgggcggctgccgggcggagaggggctcctcacttctcagatggggcggctgccgggcggaggggctcctcacttctcagacggggcggctgccgggcggaggggcttctcacttctcagatggggcggctgccgggcggaggggcttctcacttctcagatggggcggctgccgggcggaggggctcctcacttctcagacggggcagccgggcagagacgctcctcacctcccagacggggtcacggccgggcagaggcgcttctcacatcccagacggggcggcagagcagaggcggtccccacatctcagacgatgggccactgggcagagacgctcgtcacttcctagacgggatggcggccgggcagagacgctcctcacctcccagacggggtcacggctgggcagaggcgctcctcaaatcccagatggggcggcggagcagaggcactccccacatctcagacgatgggccaccgggcagagacgctcgtcacttcctagacgggatggcggccgggcagagacgctcctcacctcccagacggggtcacggccgggcagaggcgctcctcacatcccagatggggcggcggagcagaggcactccccacatctcagacgatgggccaccgggcagagacgctcgtcacttcctagacgggatggcggccggaaagagacgctcctcacctcccagacggggttgcagctgggcagaggcgctcctcacatcccagacggggcggcggggcagaggcgctccccacatctcagacgatgggtggccaggcagagacgctcctcacttcctagacaggatggcggccgggaagaggcgctcctcacttcccagactgggcagctggacagaggggctcctcacatcccagaggatgggtggccaggcagagacgctcctcacttcccagacagggtggcggccgggcacaggctgcaatctcggcactttgggaggccaaggcaggcggctgggaggtggaggttgtagctagctgagatcacaccactgcactccagcctgggcaacattgagcactgagtgaacgagactccgtctgcaatcccggcacctcgggaggccgaggcgggcagatcactcacggttaggagctggagaccagcccggccaacacagcgaaaccccgtctccaccaaaaaaatacgaaaaccagtcaggcgtggtggtgtgcgcctgcaatcgcaggcactcggcaggctgaggcgggagaatcaggcagggaggttgcagtgagccgagatggcagcagtacagtccagctttggctcggcatcagagggagaccgtggaaagagagggagagggaggagggagagagggaggagagggag

SEQ ID NO: 1104 - DNA, 1946 bp, Homo sapiens
tgtatgagagaataaacaaacttactcagactgaagagtatgttttcaaaaattaaagaagtagcaattatatgggagctgttatttattaaagcaattatctgagcccttaaagggctgtttgtttttacaatgttgtataatggccttgcaggaaaattagatttcttattctctcttccagtgtacattgtcttgagtattgtcacatttagagaccatagggagatatgggactcctagtattcagtcgacactctgaacagattttctgtgtgatacattttttcattttaattgagtcccctcttcctcccctccaactgatagctttttataactgtgtgaaatatctagagaagaatgaagtaggctgagctacattttcaagcttaacattctttagaaaactaagaaaatgcccaatatttcaacattaaggtgtcaataggggctaaatgatcactttaagatgttttcagtttggaacttgaatgtgtgtttaattttttgtgaacagattgatgactcttccgcgtctatttctctggcccagcttacaaaggtatatatatatatatattcttgaaaatataagtttttttctaacatcatatttttttatgtggaacggttttttaagaggggttgggggaggacatattttgcaaaagcattgtacatattattactatcctgtaaagagtagttgctgttttgagaagataggggaatactttgtcagcctcagcgtattggagtattgttcatcttcaagacagaagaaacacttgaagctacacttaattattttttttccctcatacattttgtttaattatacattggaaactaacaaggttctggaggaatttcctggttttggctataaattatgtggaccttttttaagcagccaaaacagaagatttcctttacacggacgattgcatggttatttcttgaatatttgacttgatcccatgaaggtcaatattttaaatgtgatgcagttgtttctttatgctatagacttgtagtctgtctgcattaggaaaagttttgaacaacctaatttgtttgaacacagactacatgaattgtgtaagtgtgtaaagctgtttgcaggaatataccaatgtgtatgtttggcagaggggcaaattgttacctcctgaatcactgtatatgccatgttttgcgataagattgcttgcattttctgctcaacaatgtgtatcttctgtttgggaaagcactagtgatggattactttttaaagcaatacatttagcttgcaaattgtgcctttaaaaaaaaaaataggcagacttttgagggccaagaaggaagctgtccagttttccaaaaatcctttttccctgctatcagaaatgtgaaaccaaatttagcaaccaagattaatgaaaagatgggttttccattagtgctgtccctatcttgttcttggctttgttatgtcctttcccctagactgtatcccgacaaaatgtcctagtaacaaattgctttttaagctcctgttctgggaaaactaagcattaaaattgattattctaaaacataaagtggactaaagccatcctattttataattttctaatgcaaagtggtttagtatagagttaacacttagaagtttatagtttactgtttttattcttatgtactgtaaggaccatatttgagtttttggtctattcctaccattgtttctttgtggggaggagttggggcggtttgggggattggttttttttttttgtttttttaaactacaggtatttgtaaaacaatgtttgggttcaaacaaattagttgttaaacatctgtaatccagttttctgtaaatgttgctgttgttctaagctctgttaatgttaagcattctttgtatataaaattacaataaaatgttaaaactg

SEQ ID NO: 1105 - DNA, 3566 bp, Homo sapiens
  SITE (3063): n equals a,t,g, or c
  SITE (3064): n equals a,t,g, or c
ctgtggctggggtgtggtcagagaagggccaggtggaggtgtttgcgctgcggggcttctgcaggtggtggaggagccccaggccctggcagccttcctccgggatgagcaggcccaaatgaagcccatcttctccttcgctggacacatgggcgagggctttgccttgactggtccccccgggtgaccggtgagtccctggggtgttcaggagtcccgggaggtcgggggagcagggtctgcaacaaggggccgggcgcttagactccaaggaggggagcgagctgcggccaggtggggcgaggtcatttcctgactcccttccccaggtcgcctgctgaccggtgactgtcaaaagaacatccacctctggacacctacggacggcggctcctggcacgtggaccagcggccattcgtgggcacacacgctctgtggaggacctgcagtggtcaccgactgagaacacggtgagggagggtggggttctggtcgtttagttctgatggattctaggccagggacctagaatcctaggtctgagggaaaagagggctgggagcctgacggaggtttagtttccaggccaagtcatagtaaggggaacagtgaaagagagagtagcccaccgctggcgcttgggcttcactgcgggctggggggcattgggaccactcagactccgcctcccccaggtgtttgcctcctgctcagctgacgcctccatccgcatctgggacatccgggcagcccccagcaaggcctgcatgctcaccacagccaccgcccatgatggggacgtcaatgtcatcagctggagccgccgggagcccttcctgctcagtggcggggatgatggggccctcaagatctgggaccttcggcagttcaaggtattttcccagccggacacctgggggctagagaagcttgctcccagcagcccctgggatttgtaggatttttcctccttgattagttttacacaaccagagctggagagcccttagaactagactcctgcctcttcagggtacagaggaggaaactgaggctcagcaagaggaagggtggcgggtctccactcttggggtcactcactctaccaggggaacagctgacaagagatggaaggggctggggcagcagagactaggactctcatctgcctgtgggagaagtacaggtgtctgtacggccagtgctgagagcttcagagagttgtagatttctagatgcaactgagaatcggggcccagcctgctcgttgtaggagaagactgaggcacagaaaggacaggagccgctgtgacatgacagccaagctagaggttgacattgtggagctgggagggtccctgtgcaggagaagttgcagcgtccggcatccctctggacaaagccgcagctttgtgctggctctgccttcccgggctgccatgatgtcatcctttttctcctccagtttgatcgtttctatagcgtcagccctggggaggaggctggagacggattccagcctcccaggcccaccaggtcacacagggcccagcttgttgaccattggaacttcagagcagcctctcctaatgagagagacgccaattgagcggggcctttgctgtagtgaaagtgctgtcattcttagtctttctttgggtcggcttccggggattgtgtttctgcctcctttgaggcctttgtagaatctgctgggagagctctgggagagccatgccctcctttttttctttttcttttttttttctttttttttgcgatggagttttgctcttgtttcccaggctggagtgcagtggcgcaatctcggctcactgcaacctcccgctcctgggttcaagcgattctcctgcctcagcctcctgagtaactgggattacaggcatgtgacaccagcccggctaattttgtatttttagtagagatggggtttcaccatgttgttcaggctggtctccaactcctgacctcgggtgatccacccgccttggcctcccaaggtgctgagattacagtcgtgagccaccgcacccagcccatgccctccttttacaaggaagaaaacaggcaggcagagggaagagcaggggcgggggttttgctacctgagctgggaggggcttctttgcaggtgaatcacagttcccagcaacccctgggctggtcagccttcttagcagccagaattaccctgtgtccctttcctggactctgggcttgtgagggcttaaggggtggggccctggctgaaccctgaggctggagaagggttggggcttctgcctgggtcctccccagagtcaggctgaggcattcagagcccgttcctcccatcctctccctctagtctggttccccagtggccaccttcaagcagcacgtggcccccgtgacctccgtcgagtggcacccccaggacagcggggtctttgcagcctcgggtgcagaccaccagatcacacagtgggacctggcagtggagcgggaccctgaggcgggcgacgtggaggccgaccccggactggccgacctcccgcagcagctgctgttcgtgcaccagggcgagaccgagctgaaggagctgcactggcacccgcagtgcccagggctcctggtcagcacggcgctgtcaggcttcaccatcttccgcaccatcagcgtctgaggcgtcccactggctctgatcttgcttcctgcttggaaactgaagtcgaattgggctcccctggaaggggttcattcaggtctgttgactgagactggccggcctgtgggctgccgtgatggattctgtttgacgtattgttctctagaaggcctggctctgatccagtgacccctctcaccaaagaactcggtttaaccagggctctgtaagaccactcccacccagagacttgtgtggcctggtgtggcctgtgtgtcggattccttcctgtcagctgtgacccatttgacctgtgtccccagaacccagttttttgtttgtttgtttgagacggagtcttggtctgtcgcccaggctggagtgcagtagcaanntcttggctcactgcaacctccgcctcctgggttaaagtgattctctcagctcagtctcccaggtagctggattacaggcatgtgcaccacaccccgttaatttttgtatttttagtagagacggggtttcaccatgttggccaggctggtctcaaattcttgatctcaagtgatctgtccgccccggcctcccagagtgctgggttgggattacaggcgtgagccaccgcgtccggctcaggacccagttttggctgctggttcccagcagggactcgggggatatacagtggctgcaccaaattggaggtgtgggttcctccaacacaatttgcttctgcccgttgtcttcctgccagctgggtttggccaggatttctccgtgtgggggctacatgcgaccctctcccctcctccctgactttagaggctggtgctgtgtcgggaggaaggtcagggctcctgagcagcaataaaggaccaggaagaggcctgaggtgta

SEQ ID NO: 1106 - DNA, 8082 bp, Homo sapiens
ccgcaggcttctttcgctggcgccattacctgagttctcctccagcgtttccgcaccctctccgattagcggtcccaggagtttccaaggtaaccgcgcagtagggcggatctcattaggcggaaagcgaaacccggaagtgacgctcttaccgggtgtcagcagcgagagggttcgaagatggcggcgcgcaagggtcggcggcgcacgtgtgaaaccggggaacccatggaagccgagtccggcgacacaagttccgagggcccggcccaggtctacctgcccggccgggggccgccgctacgcgaaggggaggagctggtcatggacgaggaggcctatgtgctctaccaccgagcgcagactggtagggctgagtccggactccagggtcctgaggtggctgatcccgagcctttaacctgagaggtgctcgggaagagaaggctggggtctaagagaagtgatttcataccggaggcggttgatccatgagggaggtggggactgagctcttactgtcccgtcttaactcgtaaaccccgccttccatccccaggcgccccctgtctcagctttgacatagtccgggatcacctgggagacaaccggacagagcttcctcttacactttacttgtgtgctgggacccaggctgagagcgcccagagcaacaggtaagacccgaggcttttccaggaccaggaggctcagtttccagccccttcctcagcacccaggagttagggcttccagtttctgcctctcgcagatccaggagtctgggtttccagcctctctccttcctaagaatcctggaatctagtgcctaactcaccccacaatttctcccagactgatgatgcttcggatgcacaatctgcatgggacaaagcccccaccctcagagggcagtgatgaagaagaagaggaggaagatgaagaggatgaagaagagcggaaacctcagctggagctggccatggtgccccactatggtggcatcaaccgagttcgggtaagtatggtcccaggagcctgctctgcatactctgaaacacatctgacccatcccctgtgtccataactcccaacacctcctcatgttcttttttttttttttttttttgagacgtagtctcgctctgtcacccaggctggagtgcagtggcgcagcctcggctcactgcaacctctgcctcccaaagtgctgggattacaagcgtgagccaccgtgcctggcccattttttttttttttttttttgagatggagtctcgctctgttgtccaggctggagtgcagtggtgcgatcttggctcactgcaacctccccttcccaggttcaagggattctcctgcctcagcctcccaagtagctggggctataggcgcctgccaccaggcccttctaattttttgttttttggtttttttttgagatgaagtcttgctctgtcgcttagactggagggcaatggcatgatctcagctcactgcaacctctgcctcccaggttcaagcgattctcctgcctcagccaagtagctgagattacaggtgcgcgccaccacgcccggctaatttttgtattcttagtagggacggggtttcacaatgttgatcaggctggtggtgaactcctgacctcgtgatccgcctgcctcggcttcccaaagtgctgagattacaggcgtgagccaccgcatctggccaattttttgtatttttagtagagacaaggtttcgccttgttggctaggctggtctcaaactcctgacctcgagtgattgatccgcacgcctcgggcacccaaagtcatgggattacaagcgtgagccaccacacccggcctccttcagtttttagaaaagtacttgtcacatagttttatacaatttagctattatgatcagtgtcattacatgttaggtactgttttagattatgaggatatggtttatgttcttcacttttctctttggtaacatagtgagttatagaacttatctgatggggctggcatgaggtcaaatgaaataacatatagtgcctagaatagcacctggttgtaatatgaggtatgtattttctgttactattcaggaactgtttttggttgtggctgtttgttttgtttttgagtcatggtttcactcccattgcccaggctggagtgcagtggcgtgatcttggctcactgcaacctctgcctcccaggttcaagtgattctcctgcctcagcctcccgagtagctgggatcacaagtgcacaccaccatgcccagtaatttttgtatttttagtagaaatggagtctcattatgttggccaggctggtcttgaactcctgagctcaagtgatctgcccaccttcgcccccaaaatgctgggattataggcatgaggcactgtgtccagcctgtttatttgttttttgcttcaaagctaaaacatcttctgatcaggtagacttgtaagtacaatgatacggtatatgaagagcacttagagcagtacttggctgatagctggggctgtctgtttccatgaaattatttttactatgtttcagtactgttctagatgcagaggatttagcagcaagcaaaaggtctctggctccatcaacttacacactagtgggggaagggaacgagatgaaactaagtaaatgtgtaccatgtccaaaggtgttaactatcctggaaaaaatccaatgaagtaggggaagagggttagggtgctccaggagtggggtgctatttttaaacagtgtggttaggaaagtattctgtcataaaatgccatttgcatagatactcacaggtagtggggcagtgaaccctgtaaaagaatttgcaggcaaggaaaaacacaagttcaaaggccctggggtgagcttggcatgtttgaagagtttcaagtgaagcgggagtgtccagtctgtctggagcagaatgaacaaaagggagaatgacacaatttggggagcgggcacagagaagacattgttcagagccttgtcggccactgtaaggactccagcttttaattgggagacgttggagggtttcaggcagaggaaagacagggtctgacttctgttttaaagtggtccctctggctgctgtccttaaatatcaattgcagagaggtaagggtcggaggaaagaatcctgtggggagacttacggtattcaggggaaggatgacatcagtagtagtgtgacagcaatagacatcatgagaagggggttggaagtgagcttttttttttagatgagacagagtctcgcttttgtcgcccaggccggagcgcaatggtgcgatctcggctcactgcaacctctgactcctgggttcaagcgattctcctgcctcagcctcctaagtagctgggattacagccacccaccagcacgcccgactaatttttgcatttttagtagaggcggggtttcatcatgttggccagggtggtctcgctcctgacctcaggcagtctgccctcctcggcctcccaaagtgctgggattacaggtgcgagccaccgcgcctggccctggaagtgagcatttttactgtagtcagcataggtgctgggcatgaggaccaagaatgagttctgaattttggggcctgaggtggagagagagcagttgcaggtggcaattaggagcttggctttggttgtatcaagtttgaatggtcaggctggcacagtggctgatgcctgtaatcccagcactttggaaagctgatgcagaaggatcgcttgagaccaggagttccagaccagcctgggcaataaagtgagaccctgtctctacaaaaaaattttaaaagccagatgtgatggtgcttacccatagtcccaactacttgggaggctgaggtgagaggatcacttgagcccaggaggttgaggctgcagtgagccattatggcatcactgcactccgtcctgggcaacagagcgggaccctgtctcaaaaacaaaaaagtttgaacggtcaatgcagtaagagtctggagcccaggggagaggtcagggctaggggtattggaaacctcgtggctggactgggtctcctagtgaacaaacacagaggcaaggagatccgaggactgagtcttgtggccttctagcatttagagggttaccgagaccaggagcctgaacaccctcccaagggctggtgggaattgcagcctcaactcccaggcatcctggggctctatcctcccacctcagctcccccacccactcccaccccctgtggagagctgtcccagttaccatgctggtttttgcaggttgtgattttcttcccacagaggtttcaaggagctgtagtcccaggcctgggagatctgaggaagcgcacttctggttctctgggatatggggagcgtggggtcagtgccttgatcctcctctcccctcgcttcacatcacccttcccccaccgctcttctgcaggtgtcatggctgggtgaagagcctgtggctggggtgtggtcagagaagggccaggtggaggtgtttgcgctgcggcggcttctgcaggtggtggaggagccccaggccctggcagccttcctccgggatgagcaggcccaaatgaagcccatcttctccttcgctggacacatgggcgagggctttgcccttgactggtccccccgggtgaccggtgagtccctggggtgttcaggagtcccgggaggtcgggggagcagggtctgcaacaaggggccgggcgcttagactccaaggaggggagcgagctgcggccaggtggggcgaggtcatttcctgactcccttccccaggtcgcctgctgaccggtgactgtcaaaagaacatccacctctggacacctacggacggcggctcctggcacgtggaccagcggccattcgtgggccacacacgctctgtggaggacctgcagtggtcaccgactgagaacacggtgagggagggtggggttctggtcgtttagttctgatggattctaggccagggacctagaatcctaggtctgagggaaaagagggctgggagcctgacggaggtttagtttccaggccaagtcatagtaaggggaacagtgaaagagagagtagcccaccgctggcgcttgggcttcactgcgggctggggggcattgggaccactcagactccgcctcccccaggtgtttgcctcctgctcagctgacgcctccatccgcatctgggacatccgggcagcccccagcaaggcctgcatgctcaccacagccaccgcccatgatggggacgtcaatgtcatcagctggagccgccgggagcccttcctgctcagtggcggggatgatggggccctcaagatctgggaccttcggcagttcaaggtattttcccagccggacacctgggggctagagaagcttgctcccagcagcccctgggatttgtaggatttttcctccttgaatagttttacacaaccagagctggagagcccttagaactagactcctgcctcttcagggtacagaggaggaaactgaggctcagcaagaggaagggtggcgggtctccactcttggggtcactcactctaccaggggaacagctgacaagagatggaaggggctggggcagcagagactaggactctcatctgcctgtgggcagaagtacaggtgtctgtacggccagtgctgagagcttcagagagttgtagatttctagatgcaactgagaatcggggcccagcctgctcgttgtaggagaagactgaggcacagaaaggacaggagccgctgtgacatgacagccaagctagaggttgacattgtggagctgggagggtccctgtgcaggagaagttgcagcgtccggcatccctctggacaaagccgcagctttgtgtggctctgccttcccgggctgccatgatgtcatcctttttctcctccagtttgatcgtttctatagcgtcagccctggggaggaggctggagacggattccagcctcccaggcccaccaggtcacacagggcccagcttgttgaccattggaacttcagagcagcctctcctaatgagagagacgccaattgagcggggcctttgctgtagtgaaagtgctgtcattcttagtctttctttgggtcggcttccggggattgtgtttctgcctcctttgaggcctttgtagaatctgctgggagagctctgggagagccatgccctcctttttttctttttttttttttttttctttttttttgcgatggagttttgctcttgtttcccaggctggagtgcagtggcgcaatctcggctcactgcaacctcccgctcctgggttcaagcgattctcctgcctcagcctcctgagtaactgggattacaggcatgtgacaccagcccggctaattttgtatttttagtagagatggggtttcaccatgttgttcaggctggtctccaactcctgacctcgggtgatccacccgccttggcctcccaaggtgctgagattacagtcgtgagccaccgcacccagcccatgccctccttttacaaggaagaaaacaggcaggcagagggaagagcaggggcgggggttttgctacctgagctgggaggggcttctttgcaggtgaatcacagttcccagcaacccctgggctggtcagccttcttagcagccagaattaccctgtgtccctttcctggactctgggcttgtgagggcttaaggggtggggccctggctgaaccctgaggctggagaagggttggggcttctgcctgggtcctccccagagtcaggctgaggcattcagagcccgttcctcccatcctctccctctagtctggttccccagtggccaccttcaagcagcacgtggcccccgtgacctccgtcgagtggcacccccaggacagcggggtctttgcagcctcgggtgcagaccaccagatcacacagtgggacctggcagtggagcgggaccctgaggcgggcgacgtggaggccgaccccggactggccgacctcccgcagcagctgctgttcgtgcaccagggcgagaccgagctgaaggagctgcactggcacccgcagtgcccagggctcctggtcagcacggcgctgtcaggcttcaccatcttccgcaccatcagcgtctgaggcgtcccactggctctgatcttgcttcctgcttggaaactgaagtcgaattgggctcccctggaaggggttcattcaggtctgttgactgagactggccggcctgtgggctgccgtgatggattctgtttgacgtattgttctctagaaggcctggctctgatccagtgacccctctcaccaaagaactcggtttaaccagggctctgtaagaccactcccacccagagacttgtgtggcctggtgtggcctgtgtgtcggattccttcctgtcagctgtgacccatttgacctgtgtccccagaacccagttttttgtttgtttgtttgagacggagtcttggtctgtcgcccaggctggagtgcagtagcacgatcttggctcactgcaacctccgcctcctgggttaaagtgattctctcagctcagtctcccaggtagctgggattacaggcatgtgccaccacaccccgttaatttttgtatttttagtagagacggggtttcaccatgttggccaggctggtctcaaattcttgatctcaagtgatctgtccgccccggcctcccagagtgctgggttgggattacaggcgtgagccaccgcgtccggctcaggacccagttttggctgctggttcccagcaggggactcgggggatatacagtggctgcaccaaattggaggtgtgggttcctccaacacaatttgcttctgcccgttgtcttcctgccagctgggtttggccaggatttctccgtgtgggggctacatgcgaccctctcccctcctccctgactttagaggctggtgctgtgtcgggaggaaggtcagggctcctgagcagcaataaaggaccaggaagaggcctgaggtgta

SEQ ID NO: 1107 - DNA, 466 bp, Homo sapiens
ttaagatcaaaggtatggttttatttcctatggctataggtaccaaggcttgctacattctcaatatcctgttcatgcaagctaggagagtgtctgacatatcccagccaatccgcattatcttgaatgctgttaatctcaccaatgagaatctatttctaacatttcattatgtcaattagccaaaccgctggtgctgatgggcgataaagagagacgaagcacttgtaatagctgcctccagagggtggactttctgattaagtgctcgctgaccagagctgaaatgtgaatgtctggttaggcaattgactgcccctagagggtagattgaaccgcctaacttacagataatatccatcctgtctacaagaaagcatttttgaaacaaatgaaagccatcacaacagagagaggaaaagaaaccggccttatgggtcctcggggagtagaaactcagtctcct

SEQ ID NO: 1108 - DNA, 32170 bp, Homo sapiens
gaacattattgcatcttgctgtttccttgggacatttggaatctgctcgagtcttactccgacataaagcagatgtgacaaaagaaaatcgccagggatggacaggtaagtatacttttacaataatttaaagtccgtctgagcaccatggtgaaaccctgtctctacaaaaaaatatgaaaattagccaggtgcggtggtgcatgtctgtagtaccagctactcaggaggctgagggggtaggatcacctgagcccggggaggttgacactgcagtgaactgtgattgcgtcactgcactccaccctgggcaatagagcaagaacttttctcaaaaaaaaggtcattcattttagtttctgtttctgaataaaggccagtctcaatcatacttttccttggagtcatctttatcttaagatttctctcttgggacaagggatggggacaaggaaatgggagcccaggatgatgcaggttgcgtcccaggccagaaaccctcggtagagaatgactcctcatccagaaacagctctcagtgcaaacttcttccaccatacacgaatgtggaggccagttttcccctgaggaatatggttacctccattgaatccatcaaaataggcaaaaatcaaaaataaattgtggctaaaagtagcctcttcctgggaaatcctgtcacttcacttgtttgtaagctcttctaccattggccagagtaattttgtgttgactgagcagggatactgtaggccaagccctgcctgccaggtctacatataaccacagttacatgttgtgtgatcgtatagttaaagccaactgtctaaacacattatcaggatttcgcaaccagtggtaagaataggggtcgggagaggtggacggggtttgatcaaggtgctaagggtactctatgttttttactcagtgaagagctagcaatcagaagtcatgatcatcctggtaaggttggactgcagcccttttcttctgaagaaaatactggtctttgatctagatactttttcagcctggttttggaatttgtcagaaagtatgagaattaaatttcacccttttgttttctagttttacatgaggctgtgagcactggcgatcctgagatggtgtacacagttctccaacatcgagactaccacaacacatccatggcccttgagggagttcctgagctgctccaaaaaattctcgaggtatccatgaaaatgtggccaggccataatctgagctaaatgctgatacaattactggagacacagtttgacatccttgtgtgccttcctaaagagttttctgattcgtgaatatgaaatactcaataccaatcacattattccttgcccttctaatttgtggaaatgtgagttcttttacaaattacacttctaagtcactgggcttacccttttaagtactatttaaaaattataattgagccaggtgtagtggctcatgcctatattcccaccactttgggaggctgaggcaggaggatttgctgaagcccaggagtttgagaccagcctgggcaacaaacaaagcaagactctgtctctaaaaaaaaattagcagggcatggtagtgcatacctgtagtctgagctacttgggaggctgaggtaggatgatcgcttgaacccagaaggttgaggctgcagtgagccacccctgagtgagggtgcagtgatcgcacccctgcactccagtctgggtgacagagcaagacctaaaataataataaatataataatataataataaatgataataaagtaaaaattagaacttaaggaaaatggacatcaaacagttaatttgtttaggtgcctgttttcttgaaagtagcctcctgagcatctgtaatcttaggaaagttgtgataggtatcacttactatgcagggattttcagattctgttaaggctcagaggtctgtgtgtaacttctccttgccaggcttgtcacttcagctattagtatttcgagacctttagtccattgccctgattcatttatagagaaaaattaatagctctatcgagaaaaggaacaactttattataaataagacagtcagctgggtgtggtggctcacgcctataatgccagcactttgggaggctgaggtgggtggatcacgaggtcaggagaccgagaccatcctgactaacacggtgaaaccccatctctactaaaaatacaaaaaattagccgggtgtggtggcgggcgcctgtagtcccagctactcaggaggctgaggcaggagaatgctgtgaacctgggaggcggagcttgcagtgagccgagattgcaccactgcactccagcctgggtgacagagcgagactccatctcaaaaaataaaaaataaaaataaaaattagtgtcaaggattttaatttttttactcatattggtccattgtgatggactgcactgaattgtattctttgcttcaagttatagagagcctgtaaatgacctgcgtacttagtggctccagaagctgtcattgatgtcttgtctttcaacagtatctccttataacatacatcagcctttcttaccacctgtttcttggaggttgtctttgctcatcattggaatgctggcagattttactccagggtagattcttggccctcctgccctgttctttggtaaaaatcatggcaaagccttgcaagtgtgtaggaataggaagaacacctggaatttctagcatttctcttcttttttttttttgagacggaatctcgctctgtagcccaggctggagtgcagtggcgcgatcttggttcactgcaagctccacctcccgggttcacgccattctcctgcctcagcctcccgagtagctgggactacaggcgcccaccaccgcgcccggctaatttttttttttgtatttttagtagagatggggtttcaccatggtctcgatctcctgacctcgtgatccgcccgcctcggcctcccaaagtgctgggattacaggcgtgagccagtgcgcccggccgcatttctcttcttgaagggtaacttttagatttctgaatctttaggaacttacaggaatggtaggtaagaaaataatcctaaacagggctgctgtggtagtttaaaacttcagaaagccaaattctacatgtttcagaggaaagtggagaaaaatgttatgttaactggagggaaaatcaacttcctgaggaagtggagtctagcaacctctttcggtttcacagagtagttcaataaataggaagcacttgccagcacacaaaccttttacagtcaagttgctcgttgaatggatggaattgacattccctgccctttgcctagaataggtggttacccacatttgcttggcagtgcttaagcccatcttcccaggttcatctttctcttactgttaggaacctgactggaaccctgaatcaggtttgacttttatccccctccaatcctcttattctcttgctttctgttcactttctttcttgattttttgagatggggtctcactctgttgcccaggctggaatagtgctatctcggctcatggcaacctctgcctcccaggttcaagcaattcttctgcctcagcctccccagtagctaggattacaggcgtgtgccaccatgccgagctaatttttgtatttatagtggagatggggtttcaccatattggccaggctggtctcgaactcctgaccttaactcatccacccgcctcggcctcccaaaatgctgggattacaggcatgagtgagccactgtgcccggccatctgttcactttcttaatgtctagacatattttatatcaaggtaaaataacactctaatatttaataaaataagtaatgggcttacacttgttttttctttctttttttttttttttccatacagtatctcgctctgttgcccaggctggagtgcagtggtgcaatcttggctctctgcagcctccacctcctggcctcaagcaatcctcccacctcagcctcctgagtagctaggactagagcgagccaccatagccagctactttctgtattttttgtggagacagggttttgccatgctgcccaggctggtctcaaactcctgagcgcaagtgatcacccgcctcagcctcccaaagtgctgggattactggcatgagccacctcacccggctaggggcttacattttatttcttcttattttctcttttttttttttttaacccagggtttttaagaaccctgttaacccctgcttatgttgtgttgatagtgccaagggtaatctgttttaaacctttgtctgcccttcaggctccggatttctatgtgcagatgaaatgggaattcaccagctggggtgagtggctgtgggctcgttatttatttctctttctaaatttacttagcccgcatgtaggtttatttttcctttgtaaaagttacatgtatttttttttagtcaaggaaatacatagtgaagaataaggaaaaataatcactgatagtcccagttaaacacaactgttaatgctttgggtgtttttcatccggtcttccccgccatgcataggacttttcctcccaggcattcatgaaggtagtatatagacaatttcatttcctccttttgtcatttatagccgacatctatattattagttttaaaatgtcactttatttttattttttattttatttttatttttatttttttgagacagagtctcactctgttgtccaggctggagtgcagtggcatgaccttggctcactgtaatcctcatctcccagattcaagcgattctcatgcctcagcttcctgagtagctgggattacaggtgcgcgccactgtgcccagctaatctttgtatttttagtagagagtggggtttcaccatgttagccaggctggtctcaaactcctgacctcaggtgatccacccaccctagccccccaaagtgctgggattacaggcatgagctaccatgcccagcctaatttttgtatttttagtagagatggggtttcattatgttggccaggctggtctcgaactcctgtcctcagctgatccaactgccccagccccccaaattgctgggattacaggcatgagccactgcacccagcccaaaatgtcactttaaattgctagaattttaataagtagatttaccataatttactaatttccttatgtggtttagcttgattcttttaaacttgttattctaaacaagatgaggtgaatattggaatagcttatttttttttaacaaaatggatatatttctctaaagtattacgtaggcagttgactgacagtatatttccatagatgttctactttcatttcttgtagataaattaacgataactcctaacttacagggtttcagctgtttccatttccagacttccctttcaggcaagaagtcatatttgtatgaaatgtttaaatgacataaaagtacgtaaaagaatagaacttcagattgttttgagaaatgaaatttttttctaatgcacatagtcactcttatttcaggttttgttaaaaagtggcatacttaggccggatgcggtggctcatgcctgtaatcccagcacttttggaggctgaggtgggaagatcacctaggtcaggagttgaagaccagcctggccaacatggtgaaaccccgtctctacaaaaatacaaaaattagccgggcatgatggtgggtgcctgtaatcccagctactcgggaagctaaggcaggagaatcgcttgaacctgggaggcggaggttgcagtgagccaagattgcgccactgcactccagcctgggcgacagggtgagactccgtctcaaaaaaaaaaaaaagtggcatactttagacatttgatactctgaatggtggatatgacaatatggtaggccacagccatatggcaagagttgcatatgtgagtgaggaaggccagatgtacagaccttatatagtggggacagaccccactataaattggggctcatttcaggatcaagaatactcttgggaaatttatttagactttttttctggtgaatggaatggaaggttcatttttatttttcaagagtgatttcctgtatggtaaatatgaaagccaagaagtccgttgtttgatggtcaccatcttgccactcccctccttttattaaatcagaatcctgatttcctggcctaggtattcttcttggcccttgagtttttctcagtagtacacttctctcctccagtgcccttggtttctagaatatgcccaaatgatgtctgtcgcatctggaaaagtggtgccaaactgcgcgtcgatatcacattgctgggatttgaaaacatgagctggataagagggaggcgtagttttatatttaagggagaaggtgagtgacttctcttgtagtaatcactgctcaagcaaaattacagggtgatttttaaccaagaaaatgctttcacattcatgtgacttttctgtctgatccttcctagggcatgtttttttggttattcttattaattattcagctctccatccctgtcttcgttcttgtctggctagctctccttcatgtgtcctttaccacccagcagttacccttgtgatgtgtctgcttcactttcctgagcctttgagcacaggccttctgtgtgtatctctgtataaccctccataatcaggcatgagaaatggcattgctcacccaatgttgtgcatacataatttctgtgaattctgtaataatatattttataaaggacattgatggaatatattgctaataagaatgcagattattaagaaaaattccgcacctttggggaagatggctcagagcttcctatgtgttgtggaaagctggtcagataatccctgtgcaaataggtagtcgataatcagtacactgtaggttttaccagatagcacctgggaggacacacatgaaagatgatacattttaacatacgaagcttccttgtttttgcatcttccctactttgcacttagttatgcctttgtttccattaatagacaactgggcggagttaatggaagtcaaccatgatgacaaagtggtcaccaccgaacgcttcgacctttcccaagaaatggagcgcctcactctggacttgatgaagccaaaaagcagggaagttgagcggcggctcacaagccctgtcattaacaccagcctcgatactaaaaatattgcttttgaaaggtacaaatttagactctaaattttaatgtctaatccccatgctgccatcttgagtgacatgtatgtattaattgtaaattatggatggattgggctttttctaatatgacataataaacactagtgggttttaagattgatctctaaccagtagaaattgtagctgacactcgacaccatccatcatttttacagttaagtcttagaagacttaaccaacatgaagagtatgaagaaatgtcttccttttcttttatgtcttttatgtgccctttctagtggattttacttgaatcctatttttgtcttagtgtttatggatccacaatactcagtcccagaccacagagcgtggagtttctggaggttagaattgacccagtactgagttcagttgtactgatattggtcagtcagattcacacttactatatagttaaatgtttgtttgtttgtttgtttgtttgtttaacccacctgtgaggtttaatagtttagagcaagaatctggaggggattcagttctgttccagactcataaagaattctccagagaggtctgtgccttggttaatccagatgaggacaccatcactggtcatgtgcctctgggccacatggagggcatgggggggcctttgagtagaggctgtcaaagctgttcgcttgtttctacagtggagaccactgatccgagggagtcctaagagcactgatagtatttgcctaggatgtcacatccagctttctgcaagccaaagtagcttagcctgagaaaatggacactatcatcctgatagtatttgcctaggatgtcacatccagctctctgcaagtcaaagtagcttagcctgagaaaatggacgctattatccttatagtatttgtctagaatgccacatccagctctctgcaagcctaagtagcttaccctgagaaaatggacactattatcctggacttaggccttcttttctcttgatgaatataacaactgtcctctcattatatttttcttttctttctagtataaaattggttaataaatgtgtttagtcaagcataaaacttgttaagtatccttttcttctaatttagattgagctgtggaattaggacatctgtttgtaatagaagaagaaaccagtgtgtccagggctgctgctagggcaggagggtggcatccctggaggcagggtcagtcctcttctgccagcctccttgcactggcctggccagttgacattcatggtctttcagggacagcaaaatttagggactgactggctttccctgggagggccttggaaagacatttccaggcttccgcatacccttctgcagacagggaggccccttcagcttagggctctgttcataaccccagaaggcagaggaagctgccttttctgccactgttcatccgtagggatgagatggggaggaactgagtgccatcagcagggctcctaaataactgcgactttgggcaagtggcctcatctctccagttttctgtttccttagctgaaagaaataattgagtgaatctggagatgaaatctccaaagtctgtgactcttaagatgtcttgagaagagacattgttccccatattgttcaacagtagagttgccagagtcattgtttgttgaagtgcgatttgtgaagagagggtgacaattcctggctgttaccccactgagtataaatgggaaatgatagcatattccatttgtaccgaggactaaggcacattttgtatttttgtgcccacagggttttcagagttctcaagctaactcttttgcaactgacagtgtgtagctgagagagaatttttggaagacagctgctttgttttaatggtgctcagaattaaatgtgtgcttgtcgtgcattgagcaagaattgagccactccttaggattgataccagctacgaaaagaatatagctgctcttgaatgtgaggtttgttggtataaaaagtgtgtgaatttacttctgatcagaggtgtgagtattcatttgattgaatttggaaggtgtggccttctctcattttcttttctttctttcttttcttttttctttcttttttttttttttttttgagatggagtctcgctctgtcgcccaggctggagtgcaatggcacgatcttggctcactgcaacctccgcctaccgggttcaagcaattctcccactttagcctcccgaggagctgggattataggcaccctccatcatgcccagctaatttttgtatttttgtagaggcggggtttcaccacgttggccaggctggtcttgaattcctggcctcaggtgatctgcctactttggcctcccaaagttctgggattacaggcatgagccacggcacccagccccctctctcattttttgatggtcacttttccacttttttctaatccgttactcagagcttatgtgtgcaaattaataccctgccctgatgaatttttggcctgcagtatatacactgtggttgcagtttgaatttttcccttttctgaaagattatgctttgcccacctcaaacaaaatattccctgccaccttcatagcctttctcctgattgtgtagcaaccaccaagacacagtgcctgtgaagtggcctttggtgtggtctcagtggagacaggcagaggtgaaaatggcacgagagggaagccaggtgttctatcatcttcggatgcttttgcatgcaaagttaccaagggccacagagttattaggaaattaaaatttaaaacagggtatgaacattgggttgaataactaaactgcttccaagagtggaaatgctgagctgggcgtgctggctcacgcctgtaattccagcactttgggaggctgaggcgggtggatcacgaggtcgggagatcgagaccatcctggctaacacggtgaaaccccatatctactaaaaatataaaaaattagccagacgtggtggcgggcgcctgtagtcccagctacttggaaggctgaggcaggagaatggcgtgaacccaggaggcggagctttcggtgagctgagattgcaccactgcactccagcctgggtgacagtgtaagagtccatctcaaaaaaaaaaaaaaaaagagtgcaaatgcttagggcagtagaggcaggattgccgaaggagcagaggtagcccggtgaggagcttggtggttccttgggagaaaagcatagcgccgtcttcccagcgtgcatgaagggtgaggtggagcagacgtaatcatctttccatccatcagaagagtctgtgccagaaaacagtgacttcctgtggcaagacatcaagtgacttaagcaaacaaggaactgaggattgaaggaaaaaggctatctcgattttctggtattaatgataaaaggggattgtagcttattaatcagttgagtctggttccttaccttctgcccctgtgactgttatcttgtttctgaagtgtcagttggagatagcatttggtataatacttttaggattcctctgtttccatccacgggttgtgctgtcctaattgtagacaactagtaggaaaatgggagctctgatccctcctgttctgatgggctaaaatagacacataaactcattataccatctggactaatttcattgaccaaatcccattagaagaaaagcaaactatttggaaacaaaatgctaataaccgcatatgttctttgtaacgtggctaacctgctgctgttccctgagcttcctgcatgacatcccaaccactcagtggtcagagcagaagtcaggctgttgccgtagccagggccaagaggagctgggatgtgatgtcctagacaaagggtagggctggtcagggatcccctgtgagagggagcgtttcccagggcaagctgctttgaaaaagaatcagagcctcctggctgcttttggttcctaaatacattttttttcaggagtatgttgagttgaataactgagattttgggcatattaccaatgctgcatctgccactggaatgctgggctactttaaaaggagttccacagagatggaattaacagctgggctaaaaaaatctgtttttcacatcctttgccctgctgcaccaaacctgcccaaacatgtgactcagctattttgcagacctaatggcatctccaagcagctcaccacagtgatgagttcctggcccacctgctcttttgtaaggagcaggatggtctgtgcctcattgttctaagaattcctcgagtgagatgtggctacttgtggagatcccaccattgacatgcatgtccccagttaagatgacccagataaatgctctgacctggttaccaccttgtggcaagcccttggatgctggtcatcttcagtcacttctttgggactgctgtccaataaatgtcaccacctttgtcctcaatgctggcagttttgtaaagaagccaagattggaggctttctatgcctggggtgaggcaaattgattaataactgtgggaggagggtggagggtgcataagccatctgtcattgctaaccgcctcctgtggacaataggaccatgatttccaagtgtccttcactaacttaagctgggggggaaaaaaactataaaggctacagatataaatctgaatggcatattgtacatgtagaaatttgtggtgttcactttttatcagaactaaatccggattctggggctggaggacagataaagcagaagttgttaatggttacgaagcaaaggtaaaaggaaactcttaaaataagatttaatatagctatttagcttctatgcaaatgaggaatctgttcccatttttttcatgcatctgtgccatggagatgctctggggaatgagaactgtctaatgtgtctctcacttggatgtttgattttgtcttatttgactttcagaaaatgggatagcatgccctgaggaggtctgtagctatgctaaagagaaacaatatggtagagaaatgagtacaggtaccagttgttctggtaggaatgacaagctagtcattcccttaattatttaaaaaaaaaaaaggaagaggaaggattagacttcacatgtgttcaaatgttgtgtagtagcttttgagtctcttttttgttaaatcagcttaattgtaatcagcaggcgcacagcccatttgcatgacatcagtgcatttaaaacatagttgtaatagtggagacgattgttgatccagtcatctggcattttgtcagctggaaagctgtttcctggcctttcagtccctcagtacaacagggattgatggcttttggtgttggagcccagtgctgcagggtcctctggtggcctctgagtgagcaaagaaaggcttacgtcatgctcagcaagatacatttagaagcacttgtcatagtgctgagtgtgttttctgcagctttgaatgttggggctcctcacgtggcatatagagagaattctttgttaactgttatgtttgattttctagaccaccatattccccagttatccttgataacagagcatttgctctggcagttacaataatttttgtcagtgcacagaatgccttttaaatagtgacttgctggttttctctacagctcataagtctatagagaaccttgtgttcatacctttctcttctgcccagcagatggctgtctgagtcatactagtattacaagactaccagcggaggctgggtgcagtggctcacgcctgtaatcccagcactttgggaggcccaagtaggcagatcacttgaggccaggattttgagaccagcctggccaacatggtgaaaccccgtctctactaaaaatacgaaaattaaccagtcatagtagcacatgcctgtaatcccagctactctggaggctgaggcacgagaatcgcttgaacccaggaggcggaggctgcagtgagcagagatcacgccactgcactccagcctgggcaacagagggagactctgtctcaaaaaaaaaaaaaaaaaaaattaccaacagaagtacaggatcctggtttgggtaccttagtttaatagaaacccaggtggaaacctagattgcagggcatttgtttgagactatttagccacagcagggcaagcaggaagatgcagcctgtcactgctaactccttagtattaaaactgtcaaacatgggaggtaactgctgatgcatttttcagttgatagtttatatactttctctgaaggatcctaatgatagttaaccatttctcatttttattttgctggattgttttctgttttttgcttcagcattcttgcttttgctgtgcttacttttggagttttgattccctgtgtcactgttttctttcgcatacacctctcaggtttacacagtaaacaatgtgaatgtgatcaccaaaatacgcacagaacatctgaccgaggaggaaaaaaagagatataaaggtaatcaccaccaccctcccacctcctgttttgttgttattttttaagcctagagggaactctttgttggctctgttaagtttagggttaatgtgattgggttgtgttaagcctaaccctaacttcttctctctctctctctttttttttttttttgaggcaaagtctcgccctgtcacccaggctggagtgcagtggcacgaccttggctcactgcaacctctgcctcctgggttcaagtgattctcctgcctcagcctcctgagtagctgggattacaagcacccaccaccacgcccggctaattttttgtattttcagtagagacggggtttcaccatgttggccaggctggtctcgaactcctgacatcaggtgatcctcacccacctcggcctccgaaagtgctgagattacaggcgtgagccaccgtgcctggcccctaacttcttttttataaaaatttctggccaggcacggtggctcatgcttgtaatcccaacactttgggaggccaatgtgggcgagtcacctgaggtcgggaattcaagaccagcctgaccaacatggagaaaccccatctgtgctaaaaaaaaatacaaaattagctgggtgtggtggcccatggctgtaatcccagctactcaggaggctgaggcaggagaatcacttgaacctggcaggcggaggttttggtgagctgagatcgtgccattgcactccagcctggacaacaagagtgaaactccatctcaaaaaaaaaaaaaaaatttcctggctgagcacggtggctcacacctgtaatcccaacactttgggaggccaaggtgggcagatcacttgaggccaggagtttgagaccagcctggccaatatggtgaaaccctatctttactaaaaatacaaaaattaaccaggcgtggtggcgcactcctgtagtctcagctactggggaggctgaggcaggagaatcgcttgaaccccagaggtggaggttgctgtgagccaagattgtcccactgcactccagcctgggtgacagagctagactctgtctcaaaaaaaagaaaaaggaaagaaaatttccttagtctgactcattcttggaggtgtttccccatagttggcctcagctgtaattaaagctattcgtgagggcttgtttatgtgttatcaagaacaattgttgaattcagccaaaaaaggagataaggacatttgagaatatttatcattggaatgagtgatttagtccaaactattgtgatgaaagatttagacagaacttggggtccaagcaaaaacattgcatgtggttgccacatcccagccccatcccagccccaccagttctatggccttgtgaaattacttctgctctgtgccttagttcctcagcagtgaaatgcaggtgatacccaaccttccttagagttattgagaggattagatgagttacgacgtggaagcctttagaatggcgcctgcagtatgtggtaagcatgcagtaattgttcaccagcaccaccaccaccattgccattactccactttgacagatgagggaactgaggcccagaacacatgggtagcgagtggccaaggtggggttggaatccaggtctggctcactccaaaatccagactcttcccattattctgctttaattcttacaactgtttatctagtttagagatcctcatgaaaagcaccctataaaggataaattagtttatggttattgtgaatgatttgatcagccagtctgtaattgcatttcctaatgaggtagcttggaccagaaactttaatgaagatcttttttttatagccacaagtgagatataatattagactttaaactccctacccctctgtagcagacaggaacccgctggaatctttgctgggaactgtggaacaccaatttggtgcacaaggggtaagttgaagcaatgagctttcattgcagttagatgaaaggaaacaacttgtctgtgtctgggatggcatttactggatcctgaacagcccactctatgtaaaggccaaagatacccccaagctggaatttgagatactcttttggaagagaattagatgagtgactctttgaaaataaataaggattttagaggaggggtagtgattatagaaatcaggtgctttccctcttatccattataaacgaggggcctctttatagaaatggaacttaaaaaggattcaggactttatattgcaacagagcaccttaacaaatattttcttacttgatgctcacagtaactatatgaacttggtacagtggatgtccctgcgggtcagaaaaatgaaattacctttccactatcaaagctagacagggaaacagctagaacttcaactccaagtcttccaagtctcatgcactttcagatatttctttctttttttctttgttataatcaggagataaaaatgtaaaggagagtagagaaatattttaaaatgaagaaatccattacacttcctgtgtagtttggtgatatcctcatagattttcttgttccatgcaaaaaagttagtgaatagaacttcccggtctttagctggttaacacgtccacctcagacactgagtgccacaggccttcacttgtgaacatcatttggcatttctgactctcctgagttctggctcagcaggacctcaccacggaatgtgctactgcaaacaaccccacagccatcacgcctgatgagtacttcaatgaagagtttgatctgaaagacagggacattggaaggccgaaagagctgacgattagaacacagaagtaagagaggttcagctgccattttcaacctatgtatgtttcagaaattgtgctgttttatggtgttatgttggatcattccactgccctccccaccacccttatttttttttcagacggagtctcgctctgtcgcctaggctggagtgcagtggcacgaactcggctcactgcaacctctgcctcccaggttcaagcggttctcctgcctcagcctcctgagtagctgggactacaggcgcgtgccaccacgcccagctaatttttgtatttttagtagagatagggtttcaccatattggtcaggctggtctcgaactcctgaccttgtgatccgcccgcctgggcctcccaaactgctgggattacaggcatgagccactgcgcccagcctcctctgcccctttttataaaaaataattttaaaattactttgccatgaaagctaacagtagattgtccatgttattagctcctttccaaatagaatctagattggatgtaagaattcctttttttttttattgctaaccagcttcagctgatcaaattcaaatgaaactgttccacccgctatcatttcttcatgcttgctgtcaattaaggctttgatcgtggcaggttgtcatgcaggtcgcttgcctttattgccagattttagggtgatgtgaattccttgtggccctagacatttgacctttaataggtctgaattaagagatgactgggcagagtgtggagtaaagctgctgttgtctagcctactgcatagcaataatctccttttcccatctggtggagatgacctcagtcttttcttggttgaattctgcaggtttaaagcaatgttgtggatgtgtgaagagtttcccctctctctggtggagcaggtcattcccatcattgacctaatggctcgaacgagtgctcattttgcaagactgagagatttcatcaaattggaattcccacctggatttcctgtcaaaataggtactgctaaataaacttcagcaacacttggaggttctgcccatgtttgtgggtggcagcatgtgggtggcaggatgcttcagggaattggagtgctttaggtcaaagtagcttatagacataacagaggaggtcagagttctcctgtggtttgatttaaagaagtgttatgattagtggttcattttgtgtatcaaagtcaagagatctccaaccatcatttctatttgcaaatggtgctgacagatataaaaaggcataaaaacatgacacagtcattgttttaatgtcaaaccttaattcagtgagacttcaaattagataattatttgaggaagacagttgacaccaagatcctttgatatgtaaatatgatctacgtcccaagctagtatgcataatgctatatatgtatatatcatacatactactcatgaagagtattaattttggatagttgtatgttcatgatacttgaaccctggcttgatcacttactcactgtgatctaggagaaaatacataactcattttctcttttttttttttgagatggagtctcgctctgttgcccaggctggaatgaagtggcatgatcttggctcactgcaacctctgcctcctgggttcaagcgattttcctgcctcagcctcctaagtagctgggattataggcatgcatcaccacgcccagctaatttttgtatttttagtagagatggggttttatcatgttggttaggctggtctcgaactcctgacctcaggtgatcagctcgccttggcctcccaaagtgctgggattacaggtgtaagccaccgcgcctgaccgaaaatacacaactctcaatctcagttttcccgtctgtgtattgggaagggttgttatgaggcttaaataaaattatacttatcaaagtacttggcatagtaagcacttagtaaatgataactattattgttattctcagtaaagtttacttataaaagtttttattttgtttgttagaaattcccttgtttcatgtcttaaatgcacggattacatttggaaatgttaatggctgtagcactgccgaagaatctgtatctcaaaatgtggaagggacccaggctgattcaggtaaaaaaataaataaatacaaagtttagttttgttatttaaaaaaaaatttatggccggacgtggtggcttatgcctgtaatcccagcactttgggaggccgaggtgggtggatcacctgaggtcgggagtttgagaccagcctgaccaacatggagaaaccctgtctctactaataatacaaaaattagccgggtgtggtggcgcatgcctgtaatcccagctactcgagaggctgaggcaggagaatcgcttgaactgggggagaggcggggggatggaggttgctgtgagccgagattgtaccattgcactccagcctgggcaacaagagcaaaactacatctcaaaaaaaaaaaattataattcagtcatcatattcataattcactctgaagctggaatatctgagggagtagatgtctgtgttggatgaaagaaaatttcagatttagtttagattaagcaaaaaaaaacttgtagaatatatatgatcctagttatattaaaaagaaaggatgttcttaaaaatcagctttattgaggtgtaatgtacatacaataaaatgctctcattttaagtgtgatggttcagtgcattttttttttttttctcagagtctcactctgtcacctaggctggcatgcagtggcacaatctctgctcactgcagcctctgcctcccaggctcaagcgattttcttgcctagtctcccaagtagctgggaatacaggtgcgtgccaccatgcctggctgatttttgtatttttattagagactgggtttcaccatgttggctaggctggtctggaactcctgacctcaagtgatccacccagctcggcctcccaaagtgctagtgtgagccaccatacccagccacattttgacaaatgtatgcatctgtgtaaccaccaccatagtcaaggtagacagcatttccatatgcccccaaatttccttacactcctttgccatcaatacaattcatgattttagatgcaattgtaaatggacttattttcttaatttcatttccagttactagtatatagaaatataattgagttttgtattttgaccttgaatcgtttttaaaaattttttatcttttttttttcttacacaattgcatggccaggattgaccttgtttatcttgtaacatggctgaatttacttgtcttacacttttttgtagatttcttagaatttcttacatatatggtcatgttgtctattaataaagaaaattttactttttcctttctaatctttaagcttttcatttctttttcttgacttactggactggctaggacatctagtacaatgttgagtaagagtggtaggaatggctgtccttgtcttgttcctggttctaggggaggaaggattgttgtgccattaggtatgatgttagctgtgtaggttttttataaatgtcccttattagttggaggacattattctcttatatttctagtttgctgagagttattaccatttttaagtattgatttttgtgagatgtgttttctgcaactatcatgatggtcctatgtttctcccctgtagtctaccagtaggaggaattaaaagatagcattttaatgtatataaattaagacttcaaataaaaacaattgaactcgacaataatatacacctttacattcccatgtagcaacaaagttgggtgagatgtgttcatgaggttgtgcagctaaggaacactcgtgcactcttggctggaagaggagattggtatagttccttgaataaaacattcggcattactgtataaactgaagatgtggatgacctagcaattcctagatgtgtaccctaaagaaagttatgcacatgagcatctggagaccccagtactgggcagcagcatccattcataacagcagaaacctggaaacgacccaaatgtcccgagatggtagaatgcgctattgtgctctattaatacaacagaataacatatagtattgaaaataaaaatttatagctatgtgcgtcaaaactgttgaatttcaaaagcataatgttgaatgaagaaaatccaatttgaagaataaattccgcatgattccatttatgtcgagttcacaaacaggctaatacaaactattaggatgatatacatgtggcaagctccagagaagagctaggcagtgtaaacaactattctgaattatgtatttacctctggagaggaagaagggaatattgttaacaagggatgtgcccgcagtatggtattgatagtgtttttttctttttcttttttttttttttttttgagacagtcttactctgtcacccaggctggagtgcagtggtgcgatcttggctcactgcaagctccgcctcccgggttcatgccattctcctgcctcagcctcccgagtagctgggactacaggtgcccgccaccacgcccggctaatttttttttttttttgtatttttagtagagacggggtttcaccatgttagccaagatggtctcgatctcctgaccttgtgatctgcctgcctcagcctcccaaagtgctgggactacaggcgtgagccaccgcgcccggcagttattgatagtgttctgtgtcttaggctaggtgaagggcacacaggcatttgtttaattattatcatttttaagtgttcagatattttatatatacttttatatatttaccatatatcttcctgcaaaaggaagaaacacattggtgtgactgtgcgtatatgtttagggggagaaatctgcgcttttcattttatagtcttgtgtatttttttatgactgtgttcgttgtttccactaaaatcaaggaaaaagaaaaaagctgtattctgtcacttttttctgtcatgcttcctcagaatctctcatataatagtaagccttgattgttataattttgagcctttcttttttttctaatgtacaacatttttgcaaaaagttggagtggaaatgtaatgaactcagacactggacggttgccttttgtttcagcttcccacatcacaaactttgaggttgatcaatctgtgtttgaaattcccgaatcttactatgttcaagacaatggcagaaatgtgcatttgcaagatgaagattacgagataatgcagtttgccatccagcaaagtctgctggagtccagcaggagccaggtgtgtttatcagaatactctaatggcagggcgtgggaggtcttaccctctgggttagcctcagtgtttggctaatctgaaagatttattctaaatatcaagtttgacacattcatggtatttgcataggttatactttgtgcatctggtcttcttacaaaagcttgttatgtaagagaccatctacataatcccagtcagcaccattcacaagatgtcttcaggcagactttccttttcctcatattcacgcacatagcttgtaattctgtactttttgagatgtgcttcatcattttctagcactgaagcagtatcatatttttcctgaaggattacctgtgtgtcagtagtctcggatgaaggtagtgaagtggatttgaatcccacttcctccacaaagggtaccatctccctaaactctctctgggtctctagtgaaacagaaaatgaaggacaggacagacctgtgtaagcagtaggctttgtgtgtgtgtgtgtgactctatgttgcccaagtcggagtgcagtggctgttccccggcatgatcatattgcaccctcaaactcctgggttcaagagatcctcccacctcagcctcccaagtagctgggactaaagtcatgcaccactgtgcccagtagaacagttgccttttattgtcatatctggttctccctccatgcctcacctacctgggacagtccaaggcttgaggtcctcctcccctaacatcaactccttccatctccttccttctgtgcctcctggctctactagggtagggtctggtctgcctccagcaccctctggtgtgtcctgggttcctgcagtccatttatttgttaattggctttttcttccattcttcattcagatatttgcagagtaccttctttgtgccaggctctgtgccaggtgctgggaattctctgggaagcagcccctgccctcacagggctgctgctttgagaacagtgctcacactccagcgtcctcactggttcaagcttatagctttctggttctattcctgagtcttagtgcttgtgtaatgtgagtctacctcctccacttccccctgccaccaccatggccccattcccagacccattcagttttccgagccagaccccaaagcaagcatgttccctttgggaggcatcctgggagaagacccctgcacatcaccatcagcctggtatgcttttcctttccctatgtaagtgagcttagctccccccgccagctcccaagtagcttcataaaccttgttgaccataagttttaacaagggaagtagccaaagtcaaagactaccagtattgaattgtgtcttctaatcttgccctagaagaattactggctgggtgcagtggctcatgcctataatcccagcactttgggaagccaagatgggaggactgattgagcccaggagtctgagaccagcctgggcaacatagtgagatcctatatctaccaaatttttttttttttttaatttttgaggcagagtctcactcttttgctcaggctgcagtgcaggggcacaatattggctcactgcagcctctgcctcccaggttcaagtgattctcatgcctcaccctcccgagtagctgggattacaggtgcgcaccaccagacccagctagtttttgtgtttttagtagagacggggttttaccatgttgtccaggctgatcccaaactccagacctcaagtgatccaccagccttgccctcccaaagtgctgggattagaggtgtgagccaccatgcctagcctctaccaaaaaattttaaaagccaagtatggtggtgtgcacctgtattcccaactagtcaggaggcttaggtgggaggatttcttgtgccctggggtcaaggctgcagtgagctacgatcacatcactacccttgagcctggacaacagagtgcgaccctgtctctaaaaaaacaaaaacctgctttggtcacttgaactttgcccaaggtcagctgtgtttttgcttttcgttgtgtatatcttccacgtgggttagctgtatttaagagactgattttgtacaaaggatgagaaggttgtggctgtgagttaggctgtggcatgttactacctcccacttaggtgttgtttttgaggtaacccaagtccctgttagcttttcacacagcactattgataatggtcatggaaagacttttaatttggttcttgctgccatcgtttccttaccagaatggcaccaatttctcctaagacgtattcatgtctatcacatttgtctttgccaggaactttcaggaccagcttcgaatggagggatcagccagacaaacacctatgacgcccagtatgagaggtgattgactgacgtgactctggaataaaccagggtgaacacaggcctggacacaggcgagcagacgcgtggcactgtgcatttggtcctcaggcagatgtacggtgccacaaactggcaggaaagactagaaaaagtaggccaggagcggtggctcacgcctataatcccagcattttgggaggccgaggcaggcggatcacgaggtcagaagattgagaccatcctggctaacacggtgaaaccctgtctctcctaaaaaaaatacaaaaaattagccgggcatggtgccaggcacctgtagtctcagctactcgggaggctgaggcaggagaatggcaaacccaggaggcggagcttgcagtgagccgagatcgcgccactgcactccagcctgggcgatagagcgagactccgtctcaaaaaaaaaaaagactaaagtgttggctctcttgcttcctcttgtggcagttacttataataactctagactcttgatagcaagtttccaggaatgggtgatagaattgctgactggttcacaggtcagtgccattgggggaaacgtactgagtcagttttttctgattggtttgatcttctatgaatgatgtatgatcacagggcctagatgtcctcagtgggaagtttatataattgtaaagataaggaagtttggaggaacagctccagagattacgggaaaaaccgcgaggattcattttacgaagacttatacttaaggtgtctatgagagcctgttgatgaagaacctgagttttgctttaaaacagatccaagttcaattcccagccctatcacttactggttgggtggtcttgggcaagattgtggggtttctcacccgtatacaacacctacaccgccagttatgtgggattaattggcatcatgcatattaaatgcctggcacagtgtgcccttggtaagcggttaagaaatgtagttactgctgccaccatgatgatgatagtagtgactctccctttttatctgttttccaacccagggccatccaggagagcctcctcaccagcacagaaggcctgtgccccagcgccctgagcgagacaagccgttttgataatgacttgcagctagccatggagctctctgccaaagagctggaggaatgggagctccggctccaggaggaagaggctgagctccagcaagtcttacagctgtcactcactgacaaatagacctttcagcctgtgagcctctgcacaaagcagaggctgtgggctgtcacagatgctgtgtcaaccagggccctagggctaagggcctgcaccttgcgtgcatgcagcaggcaacaactgccccttctttatgcagaggtgcagaaccagggactcctgggcccatccaggctgctccctggggtggagaagggaccagggattgcaggccccatctccaggctaaggggaggagagcatcatcactttccattagctgtattggcttgcaggtcacatttttactaccagctttagacaaaaccccaatccccgcaggtttgtagataaatttttatcaaggagtgataacaagacaagttattgcagagtcagggtgcttttatatataagagcagcagccgcctttgtaaagtgtgatctatgagaattggagacacttctttactgttcaccaaagaaatgggtaatctgtgctgatctccttatttttacctttttacagggtttctaggacattgtcattattcttcctccatctatctgattccattccttccacacccagctaaagttagaggagatacatatagaatctattttagattattgttaactatttgcatcaaattaagatacacaaatggccatggatgttgccttagccttaaacattactaatagtttcacatcacctcactgcacgcatcgaaggatctgatttgaatttgtaaaggcaattcttttgagagcaggattctccaggctaaatcaaaggcagctaatcctgtccctgaaggagcagctaggggaacctgaggcttgttcttgaagtgggcaagctggccaaaatattggaacacacagaaccaaaccaggtgtgttctacacctgcatgagtgaaggatttccacgtagacacctaggaagagcccgcatgccctagactcactccagaggaaggattgatttgcaaccagaaagggagctgaaaaccacggagctccatggctcttcattcaaaagggaaaataatgattccacgttgctttttagagttcaaatcaacatctttctggataaatctattttttaacaatctttttattatttgtaaaagatataaaaacaactcccatcagtagcaatacaaggttatacattttaaccagattttctcaggccttttttggatacctttagtagttaactctcttttgtcaaaccctcttgtatataaccatcgcacaacatacagaaccctggggaatacagccaagggcactgctcactgtggcccgtgtattcattcccacaggctgcactgaaataacctggtaaacaacaccctcctccattttgcgtctatttcttctattgtgcttctttggggataggaagagaaacataactactgttccaggtaacgtctgtatcatacagttagtgttgccagtgaaacgttcccagatacaaagaattgtgcttttaattccatttcacaatctgttttgttttttttttttgtcattgtctgaccaaaattccttctgcacatgaggccagtataggcaacgtcacatttgtttgtttcaaatatgcagtgtggtattttgtttactttgcatttaccgtgagcaaagatacttcttggaatggctgcagtgaggccgtgtcattggctcacaaaagtgactcataggtaatttctgtgtttgcattccactgctctgctccctaaggtccttgactttctccccaggaattcacttaaaaagggactgagcattgtgtcaacctgttgcagtgtttttcatatatgtgttcactctaaaaatgcaaataaagactgcttccttagagggtgctcatacaaaattccagtctttgagtctttttccttttcagttttttctagtcactggatgtacccacacttcctgttacgtatgtcagtagaacattagaatgcctcacttcgctcagttcatcactgcaaaggtggcatgctcctcccagccttcctgcccaggttaacaagccccatgctgcttgtttcaaatggcaactaaaagcaagccagtgttgggctgttctgacacctctgtggtcctcctggaggggaactggctcttgtggggtaagggaagcccagccaacatcaaagctctgcatcaatgctatcccttgaagccaactgctttgtgaggctgttcctagaagtccagatgataaggcttccaaactcttcctatatctaaataagcgggtattaaaaacaacaaaggcagtggccagtagaaatgtatgggttccagaaatgaggctgtatttctgggaagatgtaaaggagctgctttgcttttaggggaaagtagatatcaatactttgaagccacaaggacactatgaagaaaaccattactctttcaggtcaagaggtgcaatgactatggattatttaaaaactgaaaagctaagcttgagtggcccaatatcagcaggaagtggttttttttttttgtttgtttgttttcctgagacggagttttgctcttgttgcccaggctggagtgcaatggcgcgatcttggctcactgcaacctctgcctcccgggttcaaacgattctcctgcctcagcctcccgagtagctgggattacaggcgtgtgccaccatgcctggcttatttttgtatttttagtagagacggggtttcaccatgttggccaggctggtctcgaactcctgacctcaggtgatccacccgcctcggcctcccaaagtgctgagactacaggcatgagccaccgcactcggccagaaactttaattgagcaacttctgcacgttagacactgctaggaactaagttcctaaggcactctgctctataaacaagcttgtcacactacataaacgtggcatgtcaagggattgaaagtctgctctaaataatgacaggaaagggaaactgccataactgccagcttggtcgcagtctcctgctgaccacaaatgacatcaaggaagatgaactggatgtggagatttcaagtgattcagtggtacagtgagtgatgaagttcaaagtaccacctaggcctctgtttagaaatatgtgtaggtttaagcctgaggtccaggtggaaaaaaatacaacatgctgatatgactccacagtcactaaatcataggcagcactaggagacttttatctcaactttaggccaggcgcagtggctcacgcctgtaatcccagcactttgggaggccaaggcaggtggatcacctgaggtcaggagtttgagaccagcctggccaacatggtgaaaccccatctctactaaaaatacaaaaaaattagccaggcatggtggctcatgcctgtaatcctggctactctggaggctgaggcaggagaatcgcttgaacccgggaggtggaggttgcagtgagccaacaatgcaccattgcactctagcctgggcaacaggaaccaaactccgtctcaaaaaaagaaatttcacttcacagagcttctttaagtgattagatcaaattcagacacacacctgcatttcaaacacttgggaaataactggtggagtaaaacaatatataggattttactttagttttaattgacgttttgctcaaaagcaaagaactgaacatttcaatggttcaatgttacaagattacaaacaaaatccttacacagttacagtatcctacttcggttacttcacattaaatgcaggttgttaaaatcagtgctgtgcttgaacacaagataagcatttcaatttaataacaaaattaaatctagcaccttgaaataaatattgacgacagctttataagtatgaaagtatcatttcaataggaggaaaaaatccagttcaccaacagtggaaactaatagcagcattttcaaagctgagatgaaatttgtgtaaacacacactggcccgcacagtggacatgcacttctgttggctgggccctccccacccagggatgaacagagtgcccactgagccttttacattccaaatctggaaagctgcctcaagtttcagaccgtgggctagaaagactcaaatgcagggcaagggagatcaatgtgtttaagcaggatggggtcctttttgtaacaggccaacctagtaacatttccagtccaacttcagagcattccaggccaaaggtgcatatagtaacaggtctacctgatgtgaccctgacttcagggggagcacctgagtgcagggcaggatgcaggtgaggaacgagggcccaagatccccacagctgacaccactttgcaaccagcgcattctaggctaactcaggtgagattaaaaaaaaaaatctgtgattcttaacccactgtaaccaaatggttcttaaatagggaatgtctgcatggtaagtctccttcttaataacattttcaagcattaatgatgagttctttacagtgtggttcttacaggcactcacaaggttaccatgttttctttctcatgaacactccatctttacactgacctttggagctttcaggtcttacttttaacaagtacagtcagaaacactgagaagcggactcaggggccaattatttgcgctacagtgttaggaaaaaataatgtctagtacatgttttcttctaattcatttagcatttaccaactgtccagaccaaaggtcatttccaagtaggaaagttttggttccaacttctccactggcctgtgtgcaacacaacttatcctattcccaaatactcattgaagaacttgtctggctgtcaccgacgccgaatgggcttgtagacacaaaatgccataaggatgacagtcaccagcaggatgctgaaaatggttcccatcaacactgcaaagggaaaacaggttacttcctaatggcagctccaggttaggcaattcatccactcactgccaatgatttatcaaatgccacttgctgccaggcactatgtcaagtgctgtgcaaacagctgtaaacagatcctctctccagttgtctctaaatatagttgggggagaaacaaacagatgagagcatttcacatagcttgatataccgtgaaaaaaaaaaacagtaacatgctagggatggagacagggtgggcagcaagaaggggggacagtcaggaagcatccgaggaggagactcacaaactaagacaggccgagtgtggtggctcgtgtctgtaatctcagcactttgggaggcctaggtgggtggatcacttgaggtcaggagttcgagactagcctggccaacatggtgaaaccccgtctctactaaaaatacaaaaattggccaggtgtggtggcatccgccagctactcaggaggctactcctgagctactcagctactcaggaggctgaggcaggagaatcgcttgaacccgagaggcggaggttacagtgagccgagattgcgccactaagcgacagaatgaaactccacctcaaaaaaaaaaacaacaacaaaaaactgagaccttacgagtgaggctctgcagggagcatgctgcaggcccacagatcagctaaggaagggccttgaggccagtataagcccaatacactcagtgaacagaagggaggcaaccaggcaaggagtgcaggaagagaggcaggaaatcaggccagaaaggaaggctggggctggtctgtgcaaggccttggagaccatgaagaaaacacggattttaagtttaaagagaagccactagggggctgtaggcaaaggaatgacatcatctgatttagtcggaaaaaaaaaaaaagattcctctggcttttgtgtggagaattgtttgactataggggagcaagagagcaggatgcccaactatgcctttaaagccattaataaaaacctggagattcaataaagtatttcagtctcaagatgagtcttgacagggccttttgagcaaagaagcaactaactcacaaatctgctatgtttggctgggtgcggtggctcatgcctgtaatcccagcactttgggaggccgaggcaggcggatcacgaggtcaggagttcgagaccagcctggccaatatagtgaaaccatgtctctactaaaaatacaaaaaaaattagccaggtgtggtggtgtgtgcctgtagtcccaactactcaggaggctgaggcaggagaattgcttgaacccaggaggcagaggttgcagtgagccaagcttataccactgcactccagcctgggcaatagagggagactctgtctcaaaaaaaaacaaaaacaaaaaaaaaaatgttacgtttttaagactaaatttcacatctgaaattttcaaggtgctcaggtgagaaatgggaactacaactgattactcaagttgagccctggtgatacaggataaggacctgggctttaaactactacataacaaaaaaaaaaaaataaagaaaaaaaaaaactagcgtaaccagcaacctgtcagaggtttcttcaacagcagcagtgatacgcaatcttgtttctgtaactatctcagcgatcttgggaagcattcaaaacaagcaaatgtacactgatgtgtgtctgtagggatgtgggcccatcccaggttcca

SEQ ID NO: 1109 - DNA, 7662 bp, Homo sapiens
ctcagtagtacacttctctcctccagtgcccttggtttctagaatatgcccaaatgatgtctgtcgcatctggaaaagtggtgccaaactgcgcgtcgatatcacattgctgggatttgaaaacatgagctggataagagggaggcgtagttttatatttaagggagaaggtgagtgacttctcttgtagtaatcactgctcaagcaaaattacagggtgatttttaaccaagaaaatgctttcacattcatgtgacttttctgtctgatccttcctagggcatgtttttttggttattcttattaattattcagctctccatccctgtcttcgttcttgtctggctagctctccttcatgtgtcctttaccacccagcagttacccttgtgatgtgtctgcttcactttcctgagcctttgagcacaggccttctgtgtgtatctctgtataaccctccataatcaggcatgagaaatggcattgctcacccaatgttgtgcatacataatttctgtgaattctgtaataatatattttataaaggacattgatggaatatattgctaataagaatgcagattattaagaaaaattccgcacctttggggaagatggctcagagcttcctatgtgttgtggaaagctggtcagataatccctgtgcaaataggtagtcgataatcagtacactgtaggttttaccagatagcacctgggaggacacacatgaaagatgatacattttaacatacgaagcttccttgtttttgcatcttccctactttgcacttagttatgcctttgtttccattaatagacaactgggcggagttaatggaagtcaaccatgatgacaaagtggtcaccaccgaacgcttcgacctttcccaagaaatggagcgcctcactctggacttgatgaagccaaaaagcaagggaagttgagcggcggctcacaagccctgtcattaacaccagcctcgatactaaaaatattgcttttgaaaggtacaaatttagactctaaattttaatgtctaatccccatgctgccatcttgagtgacatgtatgtattaattgtaaattatggatggattgggctttttctaatatgacataataaacactagtgggttttaagattgatctctaaccagtagaaattgtagctgacactcgacaccatccatcatttttacagttaagtcttagaagacttaaccaacatgaagagtatgaagaaatgtcttccttttcttttatgtcttttatgtgccctttctagtggattttacttgaatcctatttttgtcttagtgtttatggatccacaatactcagtcccagaccacagagcgtggagtttctggaggttagaattgacccagtactgagttcagttgtactgatattggtcagtcagattcacacttactatatagttaaatgtttgtttgtttgtttgtttgtttgtttaacccacctgtgaggtttaatagtttagagcaagaatctggaggggattcagttctgttccagactcataaagaattctccagagaggtctgtgccttggttaatccagatgaggacaccatcactggtcatgtgcctctgggccacatggagggcatgggggggcctttgagtagaggctgtcaaagctgttcgcttgtttctacagtggagaccactgatccgagggagtcctaagagcactgatagtatttgcctaggatgtcacatccagctttctgcaagccaaagtagcttagcctgagaaaatggacactatcatcctgatagtatttgcctaggatgtcacatccagctctctgcaagtcaaagtagcttagcctgagaaaatggacgctattatccttatagtatttgtctagaatgccacatccagctctctgcaagcctaagtagcttaccctgagaaaatggacactattatcctggacttaggccttcttttctcttgatgaatataacaactgtcctctcattatatttttcttttctttctagtataaaattggttaataaatgtgtttagtcaagcataaaacttgttaagtatccttttcttctaatttagattgagctgtggaattaggacatctgtttgtaatagaagaagaaaccagtgtgtccagggctgctgctagggcaggagggtggcatccctggaggcagggtcagtcctcttctgccagcctccttgcactggcctggccagttgacattcatggtctttcagggacagcaaaatttagggactgactggctttccctgggagggccttggaaagacatttccaggcttccgcatacccttctgcagacagggaggccccttcagcttagggctctgttcataaccccagaaggcagaggaagctgccttttctgccactgttcatccgtagggatgagatggggaggaactgagtgccatcagcagggctcctaaataactgcgactttgggcaagtggcctcatctctccagttttctgtttccttagctgaaagaaataattgagtgaatctggagatgaaatctccaaagtctgtgactcttaagatgtcttgagaagagacattgttccccatattgttcaacagtagagttgccagagtcattgtttgttgaagtgcgatttgtgaagagagggtgacaattcctggctgttaccccactgagtataaatgggaaatgatagcatattccatttgtaccgaggactaaggcacattttgtatttttgtgcccacagggttttcagagttctcaagctaactcttttgcaactgacagtgtgtagctgagagagaatttttggaagacagctgctttgttttaatggtgctcagaattaaatgtgtgcttgtcgtgcattgagcaagaattgagccactccttaggattgataccagctacgaaaagaatatagctgctcttgaatgtgaggtttgttggtataaaaagtgtgtgaatttacttctgatcagaggtgtgagtattcatttgattgaatttggaaggtgtggccttctctcattttcttttctttctttcttttcttttttctttcttttttttttttttttttgagatggagtctcgctctgtcgcccaggctggagtgcaatggcacgatcttggctcactgcaacctccgcctaccgggttcaagcaattctcccactttagcctcccgaggagctgggattataggcaccctccatcatgcccagctaatttttgtatttttgtagaggcggggtttcaccacgttggccaggctggtcttgaattcctggcctcaggtgatctgcctactttggcctcccaaagttctgggattacaggcatgagccacggcacccagccccctctctcattttttgatggtcacttttccacttttttctaatccgttactcagagcttatgtgtgcaaattaataccctgccctgatgaatttttggcctgcagtatatacactgtggttgcagtttgaatttttcccttttctgaaagattatgctttgcccacctcaaacaaaatattccctgccaccttcatagcctttctcctgattgtgtagcaaccaccaagacacagtgcctgtgaagtggcctttggtgtggtctcagtggagacaggcagaggtgaaaatggcacgagagggaagccaggtgttctatcatcttcggatgcttttgcatgcaaagttaccaagggccacagagttattaggaaattaaaatttaaaacagggtatgaacattgggttgaataactaaactgcttccaagagtggaaatgctgagctgggcgtgctggctcacgcctgtaattccagcactttgggaggctgaggcgggtggatcacgaggtcgggagatcgagaccatcctggctaacacgggtgaaaccccatatctactaaaaatataaaaaattagccagacgtggtggcgggcgcctgtagtcccagctacttggaaggctgaggcaggagaatggcgtgaacccaggaggcggagctttcggtgagctgagattgcaccactgcactccagcttgggtgacagtgtaagagtccatctcaaaaaaaaaaaaaaaaagagtgcaaatgcttagggcagtagaggcaggattgccgaaggagcagaggtagcccggtgaggagcttggtggttccttgggagaaaagcatagcgccgtcttcccagcgtgcatgaagggtgaggtggagcagacgtaatcatctttccatccatcagaagagtctgtgccagaaaacagtgacttcctgtggcaagacatcaagtgacttaagcaaacaaggaactgaggattgaaggaaaaaggctatctcgattttctggtattaatgataaaaggggattgtagcttattaatcagttgagtctggttccttaccttctgcccctgtgactgttatcttgtttctgaagtgtcagttggagatagcatttggtataatacttttaggattcctctgtttccatccacgggttgtgctgtcctaattgtagacaactagtaggaaaatgggagctctgatccctcctgttctgatgggctaaaatagacacataaactcattataccatctggactaatttcattgaccaaatcccattagaagaaaagcaaactatttggaaacaaaatgctaataaccgcatatgttctttgtaacgtggctaacctgctgctgttccctgagcttcctgcatgacatcccaaccactcagtggtcagagcagaagtcaggctgttgccgtagccagggccaagaggagctgggatgtgatgtcctagacaaagggtagggctggtcagggatcccctgtgagagggagcgtttcccagggcaagctgctttgaaaaagaatcagagcctcctggctgcttttggttcctaaatacattttttttcaggagtatgttgagttgaataactgagattttgggcatattaccaatgctgcatctgccactggaatgctgggctactttaaaaggagttccacagagatggaattaacagctgggctaaaaaaatctgtttttcacatcctttgccctgctgcaccaaacctgcccaaacatgtgactcagctattttgcagacctaatggcatctccaagcagctcaccacagtgatgagttcctggcccacctgctcttttgtaaggagcaggatggtctgtgcctcattgttctaagaattcctcgagtgagatgtggctacttgtggagatcccaccattgacatgcatgtccccagttaagatgacccagataaatgctctgacctggttaccaccttgtggcaagcccttggatgctggtcatcttcagtcacttctttgggactgctgtccaataaatgtcaccacctttgtcctcaatgctggcagttttgtaaagaagccaagattggaggctttctatgcctggggtgaggcaaattgattaataactgtgggaggagggtggagggtgcataagccatctgtcattgctaaccgcctcctgtggacaataggaccatgatttccaagtgtccttcactaacttaagctgggggggaaaaaaactataaaggctacagatataaatctgaatggcatattgtacatgtagaaatttgtggtgttcactttttatcagaactaaatccggattctggggctggaggacagataaagcagaagttgttaatggttacgaagcaaaggtaaaaggaaactcttaaaataagatttaatatagctatttagcttctatgcaaatgaggaatctgttcccatttttttcatgcatctgtgccatggagatgctctggggaatgagaactgtctaatgtgtctctcacttggatgtttgattttgtcttatttgactttcagaaaatgggatagcatgccctgaggaggtctgtagctatgctaaagagaaacaatatggtagagaaatgagtacaggtaccagttgttctggtaggaatgacaagctagtcattcccttaattatttaaaaaaaaaaaaggaagaggaaggattagacttcacatgtgttcaaatgttgtgtagtagcttttgagtctcttttttgttaaatcagcttaattgtaatcagcaggcgcacagcccatttgcatgacatcagtgcatttaaaacatagttgtaatagtggagacgattgttgatccagtcatctggcattttgtcagctggaaagctgtttcctggcctttcagtccctcagtacaacagggattgatggcttttggtgttggagcccagtgctgcagggtcctctggtggcctctgagtgagcaaagaaaggcttacgtcatgctcagcaagatacatttagaagcacttgtcatagtgctgagtgtgttttctgcagctttgaatgttggggctcctcacgtggcatatagagagaattctttgttaactgttatgtttgattttctagaccaccatattccccagttatccttgataacagagcatttgctctggcagttacaataatttttgtcagtgcacagaatgccttttaaatagtgacttgctggttttctctacagctcataagtctatagagaaccttgtgttcatacctttctcttctgcccagcagatggctgtctgagtcatactagtattacaagactaccagcggaggctgggtgcagtggctcacgcctgtaatcccagcactttgggaggcccaagtaggcagatcacttgaggccaggattttgagaccagcctggccaacatggtgaaaccccgtctctactaaaaatacgaaaattaaccagtcatagtagcacatgcctgtaatcccagctactttggaggctgaggcacgagaatcgcttgaacccaggaggcggaggctgcagtgagcagagatcacgccactgcactccagcctgggcaacagagggagactctgtctcaaaaaaaaaaaaaaaaaaaattaccaacagaagtacaggatcctggtttgggtaccttagtttaatagaaacccaggtggaaacctagattgcagggcatttgtttgagactatttagccacagcagggcaagcaggaagatgcagcctgtcactgctaactccttagtattaaaactgtcaaacatgggaggtaactgctgatgcatttttcagttgatagtttatatactttctctgaaggatcctaatgatagttaaccatttctcatttttattttgctggattgttttctgttttttgcttcagcattcttgcttttgctgtgcttacttttggagttttgattccctgtgtcactgttttctttcgcatacacctctcaggtttacacagtaaacaatgtgaatgtgatcaccaaaatacgcacagaacatctgaccgaggaggaaaaaaagagatataaaggtaatcaccaccaccctcccacctcctgttttgttgttattttttaagcctagagggaactctttgttggctctgttaagtttagggttaatgtgattgggttgtgttaagcctaaccctaacttcttctctctctctctctttttttttttttt

SEQ ID NO: 1110 - DNA, 258 bp, Homo sapiens
atgagagtggtgttttggtgggaatccagctagagaatgtaattttattctgacccaaattatctgtgctttcagttttgattaaggtcctatacttcctattctagacttgaatgctgatatgtgcttgagaaatcccccatgttcagtgttgtccggtgattgcatttcatgaaagctcctggccttatttagacttaatttgagtgctgttgagagcttaaacttgtgttggatgatctggagcctgttgccaac

SEQ ID NO: 1111 - DNA, 284 bp, Homo sapiens
ggtggctcatgcctgtaatcccagcacttttggaggctgaggtgggaagatcacctaggtcaggagttgaagaccagcctggccaacatggtgaaaccccgtctctacaaaaatacaaaaattagccgggcatgatggtgggtgcctgtaatcccagctactcgggaagctaaggcaggagaatcgcttgaacctgggaggcggaggttgcagtgagccaagattgcgccactgcactccagcctgggcgacagggtgagactccgtctcaaaaaaaaaaaaaa

SEQ ID NO: 1112 - DNA, 922 bp, Homo sapiens
tgggggagagagagaccctctcattttgttttatattgttttatactcagtacctgttttaagaagaaacaacaaggaagtgaaaccaaagacgggcagcccggcgccaggcccgaaaccaggcctgggcctgcctggcctaaacccagtttcatgtgtgtgaagagaccaccaaacgtgtgtgaagagaccaccaaacaggctttgtgtgagcaacatggctgtttatttcacctgggtgcaggcgggctgagtccgaaaagagagtaagcaaagggtggtggattatcattagttcttacaggttttgggataggcggtgaagttaagagcaatgttttgcgggcaggggtggatctcacgaagtacattctcaagggtagggagaattacaaagaaccttcttaaggttgggggagattacaaagtaccttaagggtgggggagattacaaagtacattgatcagttagggtggggcagaaacaaatcacaatggtggaatgtcatcagttaaggctatttttacttcttttgtggatcttcagttacttcaggccatctggatgtatacgtgcaagtcacaggggatgcgatggcttggcttgggctcagaggcctcacacccagtagctaaaaatcaactcataacttagaaaccgatgttattcatagattccagacattgtatagaagaacgttgtgaaactccctgccctgttctgtttctctcttaccactggtgcatgcagcccctgtcacgtaccacctacttgctcaaatcaatcacgaccctttcatgtgaaatctttagtgctgtgaggagcccttaaaagggacagaaattgtgcattcggggagctcggattttaaggcagtagcttgccgatgctgccagctgaataaagcccttccttctacaa

SEQ ID NO: 1113 - DNA, 12127 bp, Homo sapiens
cgaactctttttttttgttttttttttgagacagagtctcgctctgtcgcccaggctggaatgcagtggtgcaatctcggctcactgcaagctctgcctcgccggttcacaccattctcctgcctcagcctcccgagtagctgggactacaggcgcccgccaccacgcctggctaattttttgtatttttagtagagacggagttttttaccgtgttagccaggatggtctcaatctcctgacctcgtgatccgcccaccttggcctcccaaagtgctgggattacaggtgtgagcatccgcgcgcagcccaaaacccatgttctttacctctgttattctgaatgtagctcatctaagtgaacacacaatccaccaagatataccagaaaataaacagcagcttggaaattaggcttttaaacatttggttggctcacagaatcagttttaaatggcagttcaaaagtcaccttctccaagaagggttcattcttcctttctcctttcccgtaaccattctttatgccactggtccttagtctttagaatgttagaattaaaaaagccttgggggccgggtgcggtggctcacgcctgtaatcccagcactttgggaggccaaggctggtggatcacctaaggtcaagagttcaagaccagcctggccaacatggtgaaaccccgtctctactaaaaaatacaaaaattagccaggcgtggtggctgatccctgtaatcccagctgctcgggagtctgagtctggagaattgcttgaaaccggaaagcggaggctgcaatgagccgggatcgcaccactatactccagcctgggtgacagagtgacactccatctcaaaagaaaaaaagaaaaagccttagaccattgcttcattgtacagataaaggaacaaaggttcagaggctggcctgaccttccagtagcacacagggctggaccagaataaggaatggaactgacatcttgggggagctcaagcactctaccatctgcctggtgggctggacttatccttcccctcatttgactcttttcctagctgcaaccttgagggaatcaccacctctgacttctttcctttgaatccaaggttactctgctcctcgatttctccctcatatcaaatttactaaccaatgtcagtatttgactttctttgtgacaggggatctccagtaacccattctaagagttaatgatgaggcagcatggaataggaactgagggtggaagggtttcaatcttggctcctccacctgctagctgtgtaacctgggtcaagtccctaaacctctgtgtgcctcagtttcctcctctatgaatggtgataataacaatatctatttcagagagttagtataaggattaaatgagtaaatattcattaaggactagcacacaagcactgcagaagtatttaagttaaagaataaataatttggctataatgtctatttaacagaaaaggaaacagaggctcagagattacatgacttggctttactcagtgctcttttcggtacactgctttctaatgcatggtcctgtctgtgctcactgagaaccagattccagtgagaagacttcaaggggtcttggatgctgttggaaatactgttccctcatctccttctgggcctgttatgaagtcgttgtgatgtgagcaaataagagtgaagatgtcagccaggcatggtgcctcatgcctgtaatcccagcactttgaaagtccgaggcaggaggatcacctgagcccaggagtttgaggccagcctgggcaatatggcaagacctcatctctccagaatttaaaaaattagctagacatggtggcacacacatgcagtcccagaaactcaggaggctgaggttgaaggatcacttgagtctgggaagtcaaggctgcagtaagccagcattcatgccactgcactccaacctgggcaacagagcaagaccctatctaaaaaaataaacaaataaatgagagtgaagatgtcatatccaataagcaaactgaatctaaaaatgctgactaaacattaatagttatttcccttttatctcaattaaatgagctagttaagtccctgcatgcacactctcctgtctctttcattgatttcacagtaaagtttatagctatgtaaaattgcattatcatgtatccaccctttgtgcacatgttgggtaggatattttaagggccatctcctttatattcaaagcagctcatactgcttgtggtcactacctgtttgccttgagattggctggaaatttctagagattctttactggttagatcaaggagattcagcagacagagaaggcagagacctctgccatcagcagcccagctcaggatgcccattgttccaggttaatggggttgacctgaggaactccagccacgaagaagccatcacagccctgaggcagaccccccagaaggtgcggctggtggtgtatagagatgaggcacactaccgggatgaggagaacttggagattttccctgtggatctgcagaagaaagctggccggggcctgggcctgagcatcgttgggaaacggtaaagacgtgctgtgggagttgggatctgcctttttcatccagagctctgatgcctgtgaacactgaaagagaaagcctaatgtaaagtagtgatgggatttctaaaaataagatatttatgaaaatttgacaacatgggtcatatttctgagcaaggtcttaccagaaaaattgtcatatcaagatagaactccaagtccaatcaatccagactgatatatttctgtacagagtaagaacaactagcaaggttctttcacttggaattactaagatcggagttttgcagaggttgattaaagcaaccatacccaagaaatagctagcatcaagaatgagatttatccaatgttgggtcaagaacattgcttcgacatggaaattaacatggaacattgcttttcgtgatactgttaatttcatactatgttgaaactagttgagtagacatagttaagagataaacataattcttcacgatagtagttttctattaagaaaaatgtcctgctgggcacagtggcatgtacctgttgtctcagctatgtgggaagatcacttgaggccaggagttcaaggctatagtgtgctatgatcatgcctgtgaatagccactgcacttgagcctcttgggaaacataacaagaccccatctgtaaattaaaaaaaaaaaaaagaaaaggaaaaaagaaagatgtccccaaagtaatagtttgcaccaaaaatgtaggtaggtagatcctagtggccaggctactcttttgaaatatatgttgctgccagatgcagtggctcatgcctgtagtcccagcactttgggaggccgaggtgggtggatcacctgaggtcaggagttcaagaccagcctgaccaatatggtgaaaccccatctctactaaaaaatacaaaaaattagccaggcatagtggcagacgcctgtaatcccagctacttgggagactgaggcaggagaattgcttgaacttgggaggtggaggttgcagtgagctgagatcacgccattgcattccagcctgtgcaacaagagcgaaactccatctcaaaaataaataaataaataaaaagaggtatatgttgcctaggccaggcatagtggctcacgtctataatcccaacactttgggaagctgagttgggaggatcgcttgaggtgaggagttcaatatcagtctggcaacatagcaagacttgtctctaaaaaaattttttaaataaagaaaaatgaagtctatactgcttaacagtcgtttgttccaggataatattactaagtttctcttgcagtgaattggaaaggtaagtaatagcttgaaacaaagcctagcttccatggtttactggcttttaggtatctagtatgtatttatcccaacagggctataggatttccaggtaatatcctaatatggccttaaagtgtatcaaccatcttgttaaggaagaaatcaagttgcttttatgcatgttatgttatatgccctcacagacctctggtgactagcctagtgtctgtccagcaggccaagctgttattaaaataaaaatattagctacaatttttgagtactgattttgggccaagtattgtgctgtcataatttcatttttttttacttcagcaccatagaaccatcactctgaaaatgcattaccaaacaaaaaaagctgagtctcttacatttctaaacaaaaatcagtgcacatctgggtgcagagcaactgacagagccagtgttgaagtttgctttcttgttttgacacatgcgtatacctggtgcggttttatttacagcaatgttttttgcttttagtgaatgtcagtatttcaggttgagtttgtaaggaacatttacattccttagcacaaaaacttgcattgtaaaggatgagatgtatagttctcaaaagtcactattttctttgactaacaattccatcaccaggactttatcttaaagatatacttacaagtattcattgctcattgcaatagttaaagaatggaaataacctgtatgtccatcagtaagctactggtaagtgaaattatgaaacatcatagaatagtatgtagctatttaaaaaatgaggaagctccaagtgctgataaaggcaaattaccaaggtatgaaagaaacaaaaagaaaacaaaactggaagaagaaaggagcatatatgtgtgtgcatcctgtcacacacacacgtattatgcatggaaatattaggttgtgccaatactgcactgctgtatggtattaacagaaatggaagcggagtgtttatttctgacatcgtgaaaggcggagccgcagacctggatgggagattgattcagggagatcagatcttatctgtgaatggggaggacatgagaaatgcctcacaggagacagtggccaccatcctcaaggtgagttgctaggctgctttttacccagctggcacaactgaagtccagtgggaactgttccagtctagcttgattataaaatgggttggattttatactaactctagtttttactagaaatttaatctctgattattttaaatgagccagaatagctttaaaagaaagttctgttatattgactaacagaatgaaagggaacctgctttgggatttcacaagcaagtttttcatacttgtgagaattctaagtatccatcactgttctttaaatgcatttgatgagatgggccctccaggagccacagaattcatcctcctctctctagggctatgcctgttgctttcattacccttttataatttgtggctgcagggagaggctctgttaagatatttcagaatataaatgctactacttttcatttctgttcttttcttgcctttccaagtgtgcacagggacttgtgcagctagagattggaagactccgagctggttcctggacctccgcaaggacgacatcacagaacagtcaggttgtcgatggcttctcatcagactgactcactcttctgcccccactgggagaaagttccccatttaataaatggttgtttggaaataatatctaatgtacagcatattcacagcaccaagtttagtgaactttcatgtgtttgaaataaaaatgaaaggtgggatggaaattcattaatccctagatttttctctcctttattgcttgcaaatgttttcttggaagctcttttctctctattagttctatattgcctatgcacgcatgtacacagctgtgtttatttaaaaaaaaaaaaaggcaacatctggtggcaatttgaccctcattagcacaacattgttctattcattcaattaaatattgctataaagttaacttgtgactagccactcacacatgccgagggcaattaatggcatattcctaggagaaccaagtgtgggggtttttcctgtgggagggagggcttagtgggtgatattttgtgggttagcaaacatcttatatttatttgcaaagctgatgtaagtgccatttttttttagcaaagtatatttcactatatttttttcattgtaatggctgacaaaatcaagatggtagactgtatggttagccccatgtggtacataatgagactatagaaacttatatgtgacccctaagtctcctctctgggttatggataggccgccttagttttgaggttaaaagcatgacttttggtcccctccctggttgccttatttctgaagcctctccaaggcctttgttcagaaggtgctctgatcttacagttagcacacagttacttctggaaagctattagctgcctcctgttcctcactggtgttaaaaaatgagtgaggaaaataccattgttcagataggattacagactagctggcttgtcttagggaatcttcaaagcagtcaaacccaataaacaccatattaagtttgaaacactttttttttttttcatttctggcttacataatgggcagcaaatatctaagacatggtgctgctgtaggattccatgagttaatagttagtgatgatattgaccagacttatatcaacaaacgaaacagttgtctagccaggcttcttccttaatggaagactcatctttgttgaatgatttcattaaagccttattgtatacagaagattagaatgaagctacacagaggaggttccattgaatctcactccaaatggagtttggggaaaagaaggaaaaggcatctcagacagggaaaatagcatacacaaaggcccaaagaggtaacaggtgtttgtgtgatttaagaaaagtttggactgatcgataggtaaggtagtggatagaaatggatttctgtccctcttgagagatgtatgtgagcatcttcttatttatttatttatttatttttgagacggagtcccactctgttgcccaggttggagtgcaatggcgcgatctcagctcactgtaatcttcgcctcccgggttcaagtgagtctcctgcctcagcctctcgagtagctgggactacaggtgcccgccaccacatccggctaatttttgtatttttagtagacacggggtttcaaaacatcttggtcaggctggtctcaaactcctgatctcaggtgatccacccacctcggcctcccaaagtgcctggatgacaggtgtgagcccccgcgcccagccgcatcttcataatttttaagttcacactcaaagacagaactaccaaatttagaagctacatcattaaatatcaaaaaaaaaaaaaacctatcgtctccacttacctggtatatgaatgtgagttgtcatattttggaaacctgggacaaagtatcaaatactttgccctaatcttcttacacagaattttaatttcagagggtaggagtttaattcaatttttaaaaacagtaaatatatcttatcatcaccttgtgcttaaaattatgggtgagatagaagagtttgccctatttggctaattagaagaaggctggtagccgactgtgaaaaggaaatgtcttcccatcatgatgagttgaagactgaccctggtgggcaaaaacaagattccattgccaaacatttttacatccagacccatttaaaaaatcaggatcttgtaggaacacagatttccttctgagcagttacaaaatagggagatcaatgccttcttttgagcgctaaggagaataagctcttgacttaattcatagaaagtgagttcattaagagagaaataacttctagctttggggccaccaagtgtctttttttaaaatgactttcccccaaaccaggaagaaatttccttactccacagaggaaaaaatacttgcgagatcttttcctcagccaactaagggaacacagtcaggcaaagtgtacttttataaacgtcttggggccgggcgtggtggctcacatctgtaatcccagcactgggagttcgaggcgggcagatcacttgagggcaggaattcaagaccagcctggccaaagagcctggtgaaaccctgtctctactaaaaatacaaaaattagctgggcatagtggtgggctcctgtaaccccagctactcaggaggctgaggcaacagaatcacttgaacctgggaggcggaggttgcagtgagctgaaattgcaccactgcactacagcctgggtgacagagggagactcctcaaaaattacaatacaatgcaataaaggtcttggcaaacacacctttctgaaattttttaaaggcaaaagttataatatactgtacttcctcagttctgattagttatctattatagtaccatttacttaaatcatatcctttaaggaaaagtataaaaacactcctttaaatgtatatagccactatgaagtatactgagatctacaacttactttgaaatgaattttttaaaaaaagatgagtgatgaatagataaatggctatgtgataaaggaaatatagcaaaatactcattgtgaaatctaggtgctatttatatggatgtctattgtataattctttcagcttttctatatatttgaaggttttcatattttaggaattaaaatattaaacaactttcatcatagagttaagaaaatggaccaaattataatttatgaactgataacagtgatcttaggcttagcttaaaattttgatgcagaataatttggtagaaaaaaatattcattatttgcaatgttttcgtctacataagaaaggcccttcactatgtatacagtttttgttgaacagccactagccttaaaagactacacagtattaacctcacatattcatttaaatgaataaagggacaggtaatggagatctagcagattggactaaattattactgattctaggaaaatctttgagaaaaaaatgttatatatccctaaaacaagtctttttcccttcagatttggtgcttttttccccacaattgagggttctattttggcaggtttctgctaatcaaggtcttattatacttgttttagcaaaatacataatacattttgggtaataaagttgactgtaaccccaaatgaaacatagtgcccattagctgactatatatacataaacactatgtggcaacctaggaaaatggttttgattttatgtggagcaagaacagctgaaatgattctatggtctccaccttggtgattgaaaccatatacaaaagcacacataatggagaaagcaatggaggaaatgtctaaatgggattgggttgaggtagtaagagaatagtgtgggtgatttttgttttctttcctggcctcctcacgattttctgttagatggttatggtgacatcagtaattggcacactaatggataagtatgcatttagggggtcaagtcagtgtctgcacacaggtgacccctgggtctttctttcagggtagtcagcagagtgcacacagcagctgtcatccctccttcgctcctgtcatcactggcctgcaaaacctggttggcacaaaaagagtttcagatccttcccagaaaaattcaggtattacacggacacacccagagcaaaactatcctgttacccaaattaaaaaaaaaaaatgtgttttttaaaaaccagtcttctttaatataaatgttttttaattttttgagcttggccacataagctgagctttctgaaaggcatgttctgaaggtaggaaagccatagagattccttcagtggtggccaggcatggtggctcacacctgtaatcccagcactttgggacggctgtggcgggcggatcacctgaggtcaggagatcgagaccatcctggctaaccccgtgaaaccccgtctctattaaaatacaaaaaaaaattagccgggcgtggtggcatacgcctgtagtcccagctactcaggaggctgaggcaggagaattgcttgaaactggcgggggtggtggaggttgcagtgagccaagatcgtgccactgcactccagcctgggtgacagagcaagactccgtctccagaaaaaaaaaaagaaattccttcagtggcacaacacaaagcacctgaaaaacagaaaagcagaaagctggagtgcatggtaaaataaaattacttacaaagagaaaattaataaattacaggtcactggagaaaggtcagaagtgtgtataccttctatgggaaaattgggccagttaaaagaaaaaaaaaagtgtgtatatccttgggggcagggtgggacaaggggtccttttaagtcttttgttgaatggagggttatctttgattaaggtagaaaaaaatgtacaatgaaacacaaatgactcagccgggcccggtggctcatgcctgtaatcttagcactttgggaggccaaggcaggcggatcacctgaggtcaggagtttgagagcagcctggccaacatggagaaacctcgcctgtactaaaaatacaaaaattagccgggcatggtggcacatgcctataatcccagctacttgggaggctgaggcaggagaatcgcttgaacccaagaggcagagatggcagtgagctaagatcggaccactgcactccagcctgggcgacagagtgagactccatctaaaaaaaaaaaaaaaaaaaaaaccacacacacacacaaaaatgagtcatcctccaagcatttactcaccatgttccaggcagctgctgctatatagcccatccacttttgtcagaccaaatggttatggccacattgatctcaaacagagagcacttctttaaaatagaggacacagcaggccgggcacggtggctcacgcctgtaatcccaacactttgggaggccgaggcaggtggatcacttgaggtcgagagtttgagaccagcctggccaacatggtgaaaccccgtctctactaaaaatacaaaaattagccgggcgtggtggcaggcacctgtaatcccagctatttggaggcagaggcagaagaattgcttgaatctgggaggcagaggttgcagtgagctgagatggtgccactgcactccagcctgggtgacaaagcgagactctgtgtcaaaaaaaaaaaaaagaggacatggcccctggtgacttggctaccagcttggatgctgaggaagggtacaatacctgcttgctttagtgtcttctcttgaaagacctagaaaatgaaaccatttttcatggggcaatattatatgctaaatatattattttttaatattaaaaagttaattgtgttgcttctttataggcacagatatggaaccaaggactgttgagataaacagggtaagtcagtcattttgctgtatgtatttttctggtttgtgttggatttgcactaaatgtacattttccccaatacagtttattggattgtgagtgtgctctttcaagttactgagataaaaatatggtctaaataacatcaataaatagacttagaaaagtacagtagagcacagagatgacctctatgaattttttggcaaatctcatccactatattctgtgctatgtgtaagttttatttttatttatttattttttcaatcttagtcttttaacctgtacatgtaaagttttataaaacaaaaatggtatcatgtggcacatactaaataagtattttttgagagcatatagtatgatttttatcgatttcatagtactccatcttatgaatgtgctataagtttcttttttttttttttttttttttttttgagacagagtcttgctctgtcacccaggctagagtgcactggtgcgatctcggctcactgcaagctccacctcctgggttcatgccattctcctgcctcagcatcccgagtacctgggactacaggcgcctgccaccacgcccagctaattttttgtatttttagtagagacgggttttcaccgtgttagccaggatggtctcgatctcctgacctcgtgatccacctgccttggcctcccaaagtgctgggattacaggcgtgaggcaccgtgcccggc

SEQ ID NO: 1114 - DNA, 4827 bp, Homo sapiens
ttttccctgtggatctgcagaagaaagctggccggggcctgggcctgagcatcgttgggaaacggtaaagacgtgctgtgggagttgggatctgcctttttcatccagagctctgatgcctgtgaacactgaaagagaaagcctaatgtaaagtagtgatgggatttctaaaaataagatatttatgaaaatttgacaacatgggtcatatttctgagcaaggtcttaccagaaaaattgtcatatcaagatagaactccaagtccaatcaatccagactgatatatttctgtacagagtaagaacaactagcaaggttctttcacttggaattactaagatcggagttttgcagaggttgattaaagcaaccatacccaagaaatagctagcatcaagaatgagatttatccaatgttgggtcaagaacattgcttcgacatggaaattaacatggaacattgcttttcgtgatactgttaatttcatactatgttgaaactagttgagtagacatagttaagagataaacataattcttcacgatagtagttttctattaagaaaaatgtcctgctgggcacagtggcatgtacctgttgtctcagctatgtgggaagatcacttgaggccaggagttcaaggctatagtgtgctatgatcatgcctgtgaatagccactgcacttgagcctcttgggaaacataacaagaccccatctgtaaattaaaaaaaaaaaaaagaaaaggaaaaaagaaagatgtccccaaagtaatagtttgcaccaaaaatgtaggtaggtagatcctagtggccaggctactcttttgaaatatatgttgctgccagatgcagtggctcatgcctgtagtcccagcactttgggaggccgaggtgggtggatcacctgaggtcaggagttcaagaccagcctgaccaatatggtgaaaccccatctctactaaaaaatacaaaaaattagccaggcatagtggcagacgcctgtaatcccagctacttgggagactgaggcaggagaattgcttgaacttgggaggtggaggttgcagtgagctgagatcacgccattgcattccagcctgtgcaacaagagcgaaactccatctcaaaaataaataaataaataaaaagaggtatatgttgcctaggccaggcatagtggctcacgtctataatcccaacactttgggaagctgagttgggaggatcgcttgaggtgaggagttcaatatcagtctggcaacatagcaagacttgtctctaaaaaaattttttaaataaagaaaaatgaagtctatactgcttaacagtcgtttgttccaggataatattactaagtttctcttgcagtgaattggaaaggtaagtaatagcttgaaacaaagcctagcttccatggtttactggcttttaggtatctagtatgtatttatcccaacagggctataggatttccaggtaatatcctaatatggccttaaagtgtatcaaccatcttgttaaggaagaaatcaagttgcttttatgcatgttatgttatatgccctcacagacctctggtgactagcctagtgtctgtccagcaggccaagctgttattaaaataaaaatattagctacaatttttgagtactgattttgggccaagtattgtgctgtcataatttcatttttttttacttcagcaccatagaaccatcactctgaaaatgcattaccaaacaaaaaaagctgagtctcttacatttctaaacaaaaatcagtgcacatctgggtgcagagcaactgacagagccagtgttgaagtttgctttcttgttttgacacatgcgtatacctggtgcggttttatttacagcaatgttttttgcttttagtgaatgtcagtatttcaggttgagtttgtaaggaacatttacattccttagcacaaaaacttgcattgtaaaggatgagatgtatagttctcaaaagtcactattttctttgactaacaattccatcaccaggactttatcttaaagatatacttacaagtattcattgctcattgcaatagttaaagaatggaaataacctgtatgtccatcagtaagctactggtaagtgaaattatgaaacatcatagaatagtatgtagctatttaaaaaatgaggaagctccaagtgctgataaaggcaaattaccaaggtatgaaagaaacaaaaagaaaacaaaactggaagaagaaaggagcatatatgtgtgtgcatcctgtcacacacacacgtattatgcatggaaatattaggttgtgccaatactgcactgctgtatggtattaacagaaatggaagcggagtgtttatttctgacatcgtgaaaggcggagccgcagacctggatgggagattgattcagggagatcagatcttatctgtgaatggggaggacatgagaaatgcctcacaggagacagtggccaccatcctcaaggtgagttgctaggctgctttttacccagctggcacaactgaagtccagtgggaactgttccagtctagcttgattataaaatgggttggattttatactaactctagtttttactagaaatttaatctctgattattttaaatgagccagaatagctttaaaagaaagttctgttatattgactaacagaatgaaagggaacctgctttgggatttcacaagcaagtttttcatacttgtgagaattctaagtatccatcactgttctttaaatgcatttgatgagatgggccctccaggagccacagaattcatcctcctctctctagggctatgcctgttgctttcattacccttttataatttgtggctgcagggagaggctctgttaagatatttcagaatataaatgctactacttttcatttctgttcttttcttgcctttccaagtgtgcacagggacttgtgcagctagagattggaagactccgagctggttcctggacctccgcaaggacgacatcacagaacagtcaggttgtcgatggcttctcatcagactgactcactcttctgcccccactgggagaaagttccccatttaataaatggttgtttggaaataatatctaatgtacagcatattcacagcaccaagtttagtgaactttcatgtgtttgaaataaaaatgaaaggtgggatggaaattcattaatccctagatttttctctcctttattgcttgcaaatgttttcttggaagctcttttctctctattagttctatattgcctatgcacgcatgtacacagctgtgtttatttaaaaaaaaaaaaaggcaacatctggtggcaatttgaccctcattagcacaacattgttctattcattcaattaaatattgctataaagttaacttgtgactagccactcacacatgccgagggcaattaatggcatattcctaggagaaccaagtgtgggggtttttcctgtgggagggagggcttagtgggtgatattttgtgggttagcaaacatcttatatttatttgcaaagctgatgtaagtgccatttttttttagcaaagtatatttcactatatttttttcattgtaatggctgacaaaatcaagatggtagactgtatggttagccccatgtggtacataatgagactatagaaacttatatgtgacccctaagtctcctctctgggttatggataggccgccttagttttgaggttaaaagcatgacttttggtcccctccctggttgccttatttctgaagcctctccaaggcctttgttcagaaggtgctctgatcttacagttagcacacagttacttctggaaagctattagctgcctcctgttcctcactggtgttaaaaaatgagtgaggaaaataccattgttcagataggattacagactagctggcttgtcttagggaatcttcaaagcagtcaaacccaataaacaccatattaagtttgaaacactttttttttttttcatttctggcttacataatgggcagcaaatatctaagacatggtgctgctgtaggattccatgagttaatagttagtgatgatattgaccagacttatatcaacaaacgaaacagttgtctagccaggcttcttccttaatggaagactcatctttgttgaatgatttcattaaagccttattgtatacagaagattagaatgaagctacacagaggaggttccattgaatctcactccaaatggagtttggggaaaagaaggaaaaggcatctcagacagggaaaatagcatacacaaaggcccaaagaggtaacaggtgtttgtgtgatttaagaaaagtttggactgatcgataggtaaggtagtggatagaaatggatttctgtccctcttgagagatgtatgtgagcatcttcttatttatttatttatttatttttgagacggagtcccactctgttgcccaggttggagtgcaatggcgcgatctcagctcactgtaatcttcgcctcccgggttcaagtgagtctcctgcctcagcctctcgagtagctgggactacaggtgcccgccaccacatccggctaatttttgtatttttagtagacacggggtttcaaaacatcttggtcaggctggtctcaaactcctgatctcaggtgatccacccacctcggcctcccaaagtgcctggatgacaggtgtgagcccccgcgcccagccgcatcttcataatttttaagttcacactcaaagacagaactaccaaatttagaagctacatcattaaatatcaaaaaa

SEQ ID NO: 1115 - DNA, 112 bp, Homo sapiens
tttttttgagaaggagtttcactcttgtcgcccaggctggagtgcaatggtgcgatctcggttcactgcaaactccacctcccaggttcaagcgattctcctgcctcagcct

SEQ ID NO: 1116 - DNA, 467 bp, Homo sapiens
atttttaaaaacagtaaatatatcttatcatcaccttgtgcttaaaattatgggtgagatagaagagtttgccctatttggctaattagaagaaggctggtagccgactgtgaaaaggaaatgtcttcccatcatgatgagttgaagactgaccctggtgggcaaaaacaagattccattgccaaacatttttacatccagacccatttaaaaaatcaggatcttgtaggaacacagatttccttctgagcagttacaaaatagggagatcaatgccttcttttgagcgctaaggagaataagctcttgacttaattcatagaaagtgagttcattaagagagaaataacttctagctttggggccaccaagtgtctttttttaaaatgactttcccccaaaccaggaagaaatttccttactccacagaggaaaaaatacttgcgagatcttttcctcagccaact

SEQ ID NO: 1117 - DNA, 236 bp, Homo sapiens
cccaggagtttgaggccagcctgggcaatatggcaagacctcatctctccagaatttaaaaaattagctagacatggtggcacacacatgcagtcccagaaactcaggaggctgaggttgaaggatcacttgagtctgggaagtcaaggctgcagtaagccagcattcatgccactgcactccaacctgggcaacagagcaagaccctatctaaaaaaataaacaaataaatgaga

SEQ ID NO: 1118 - DNA, 449 bp, Homo sapiens
aaaaaaaataaaataaaataaaattagccaggtatggtggtgtgtgcctgtagtcccagatactcaggaaggatttgggacgatcacttgaggctaagagtttgagaccagccagggcaacatagcaagactccatctctacaaaaaataaaataagtagctggacacgatggcacacaccttaagtcccagctacttgggagtctgaggcagaaggatcacttgaacccaggagttggaggctgcagtgagctatgatcacgccattgcgatcataggctgggtgacagagcaagagaccctgtctcttaaaaaaagaaagaaagaaaagaaaaatgatactcaacccttgtccattgggcctgactctcacctcccacctctactttgtgaggaagggacagggtgttaatatgtcttcattggagggtactggggcccagagaggg

SEQ ID NO: 1119 - DNA, 268 bp, Homo sapiens
cagaagtggaagtaatgcaggtgttcagagaaagggccggatgtgtgtgcatgcgcacacccagctacaaaacaaggggtgccattcctcagggaccaggccattaacgtgagccacccgtctgatgcgtagtcacccgccggggtgacgggggacttcctggactctgcggcctgatcctgcctgtctggtgacattcctgatctggagtacacattgggcctgcagtgggtgctttggtgtttgtggaatgaatgaatgggctggc

SEQ ID NO: 1120 - DNA, 138 bp, Homo sapiens
ctaaaaatacaaaaattaaggctgggcgcagtggctcacacctgtaatcccagcactttgggaggccgaggcgggtggatcacctgaggtcaggagttcgagaccaggctggccaacgtggcgaaaccccatctctac

SEQ ID NO: 1121 - DNA, 886 bp, Homo sapiens
ctaaaatttgctggacaaaaattgtacctcacagttaacagtctgtttcactaacatttgtgcataaaacctatatatctgaaggaaaaaatgcctaaaagcaaagataatatgagggtagccatggggaaaacataaattggcaccaaaatccttgaaaagtatcctaacccatgctgtttcacgtttacactttactcaatttacctttatcagaggggccagaaacaatcaattcaacttcattgaccctataatttacaaaggaatagcgtatgtattggctttggggtttctaagaaatagtaaaaggataaatagtgaattggtcacctaatcgggaaaggtggttccttggtaagatgataatttcaggtgtgaatgaccacagtgtattcctctgcccactccttcagcctcatagcctcaggcaaggtggccacttcaatagaaccctgcaaagtcagagggcctgagttcaagccctaacgcctttgtctctctgatttacccactctgacacaaggcaggcttctcacttctcagagtgtttcctcattaggagtctgataataattcagatattacctcccaagggaaaagaggaaataatatatacaacaatgctttatatagtataccttgatgtccctaaatcattatatttctggatgcttttcctgaagcaaatgtttggctggactaccaaagtcagtaatttcataggcttttctcaagtatttgtcgtaactactgtcgtctccattttacctaaaacattaattttcccatgagaatacaccagaggttctataattgtactgctagacttaatttctcaccctttcccccttagtctttgaataaaacaatttctatacattta

SEQ ID NO: 1122 - DNA, 886 bp, Homo sapiens
ctaaaatttgctggacaaaaattgtacctcacagttaacagtctgtttcactaacatttgtgcataaaacctatatatctgaaggaaaaaatgcctaaaagcaaagataatatgagggtagccatggggaaaacagaaattggcaccaaaatccttgaaaagtatcctaacccatgctgtttcacgtttacactttactcaatttacctttatcagaggggccagaaacaatcaattcaacttcattgaccctataatttacaaaggaatagcgtatgtattggctttggggtttctaagaaatagtaaaaggataaatagtgaattggtcacctaatcgggaaaggtggttccttggtaagatgataatttcaggtgtgaatgaccacagtgtattcctctgcccactccttcagcctcatagcctcaggcaaggtggccacttcaatagaaccctgcaaagtcagagggcctgagttcaagccctaacgcctttgtctctctgatttacccactctgacacaaggcaggcttctcacttctcagagtgtttcctcattaggagtctgataataattcagatattacctcccaagggaaaagaggaaataatatatacaacaatgctttatatagtataccttgatatccctaaatcattatatttctggatgcttttcctgaagcaaatgtttggctggactaccaaagtcagtaatttcataggcttttctcaagtatttgtcgtaactactgtcgtctccattttacctaaaacattaattttcccatgagaatacaccagaggttctataattgtactgctagacttaatttctcaccctttcccccttagtctttgaataaaacaatttctatacattta

SEQ ID NO: 1123 - DNA, 509 bp, Homo sapiens
aaatagatcatttaaatatttctataactattgagaacttgaattcaaatgtagaaattcttcaaaaagaaatctctagacccaggtattttcactagagacttctgctagaggtttaagaaatcattaacatcaattctatacaatctcttccggaaaagagaagaggaaacacttcccaattctttacctcaaactagtattaccttgatactaaaaccaacaaagtaccaacagtatcaaaacaaagtaaacttcagactgatatcccttgcgaatataaacacaaaattcccaaacaaaattgcaaaaatagatttcaataatatattaattatataccatgaccaaatgaggttttcttccagggatgcaaggctgtttcaatattcaaatacatcatattacatgttaagaggcaaaataagaaaaatcacataatcatataaattggtacagaaaaaaaaatttgaaagaattcaatacccattcatggtaagaactctcag

SEQ ID NO: 1124 - DNA, 508 bp, Homo sapiens
aaatagatcatttaaatatttctataactattaagaacttgaattcaaatgtagaaattcttcaaaaagaaatctctagacccaggtattttcactagagacttctgctagaggtttaagcaatcattaacatcaattctatacaatctcttctggaaaagagaagaggaaacacttcccaattctttacctcaaactattattaccttgatactaaaaccaacaaagtaccaacagtatcaaaacaaagtaaacttcagactaatatcccttgcgaatataaacacaaaattcctaaacaaaattgcaaaaatagatttcaataatatattaattatataccatgaccaaatgaggttttcttccagggatgcaaggctgtttcaatattcaaatacatcatattacatgttaacaggcaaaataagaaaaatcacataatcatataaattggtacagaaaaaaaatttgaaagaattcaatacccattcatggtaagaactctcag

SEQ ID NO: 1125 - DNA, 509 bp, Homo sapiens
aaatagatcatttaaatatttctataactattgagaacttgaattcaaatgtagaaattcttcaaaaagaaatctctagacccaggtattttcactagagacttctgctagaggtttaagaaatcattaacatcaattctatacaatctcttctggaaaagagaagaggaaacacttcccaattctttacctcaaactagtattaccttgatactaaaaccaacaaagtaccaacagtatcaaaacaaagtaaacttcagactgatatcccttgcgaatataaacacaaaattcccaaacaaaattgcaaaaatagatttcaataatatattaattatataccatgaccaaatgaggttttcttccagggatgcaaggctgtttcaatattcaaatacatcatattacatgttaagaggcaaaataagaaaaatcacataatcatataaattggtacagaaaaaaaaatttgaaagaattcaatacccattcatggtaagaactctcag

SEQ ID NO: 1126 - DNA, 653 bp, Homo sapiens
caataatctaagcatccagttaggaacctaggaaaaaaagagcaaaataaactgaaagccagtagaatcaaggaaataataaagagtagaaatcaatgaaattgaaaatagaaaaataatagagaaagctgtattagtcttttttacattgctataaagaaatacccgaggactgggtagtttagaaagaaaagaggtttatttttgctcatggttctgcaaaccgtacaagaagcatgcatggtaccagcatctgcttctggtgaagaccttaagaagcttataatcacggtggaaggcgaagggggagcaaacaagagagagaaaggttccagtggggagggggcaggtcaagagagagggagcaacagagagacgagtgaggtcccagattctcttaacaatcagatctcacataaacttacagagggagaactcccttaatactgtggggcgggaaccacgtcattcatgagggttccacccccatgacccaaacacctcccactagatcccagctgcaacactagagatcacttttcaacatgagatttggagggaacaaatatctaactatatgaaaagccaagggaaaaaaggagctggttcttcaaaaaggtcaataaagttgacaaacctctagcaagactgac

SEQ ID NO: 1127 - DNA, 561 bp, Homo sapiens
aaggctgacaacaaggcatgtatgttcacattcaccacttattaaacacagtgctaaaagttttagtgcaaaaggcaaataatggaaataaaaagcatacagattaaaaagtaagaaataaaactgtccctatttgcccatgccagaactatgtaaaaaatcccagcaaatctaaaacaacaacaaaaagataaccacaacaaaactcctagaacaagtgagttcagcaaagttgcgtgataaaagataaacataaaaaaatgtattttatgtgctaatgatggacaccaaaattaaaattataattctatgacatgaaaaacttaaatgtatatctagcaaaatacgtataagacttagatgatcaaaactatacaatgctgaggaaaggaatcaaaggtgatctaaataaatgaagagatataccatgttcataaactggaagattcaataaagatgtcagttcttccaaaattgatttacaaatttaatgcaattcttatcaaagtcccaacaagatttttgtagatatagcatgttgtaaaatatatatgaaaaggc

SEQ ID NO: 1128 - DNA, 653 bp, Homo sapiens
caataatctaagcgtccagttaggaacctaggaaaaaaagagcaaaataaactgaaagccagtagaatcaaggaaataataaagagtagaaatcaatgaaattgaaaatagaaaaataatagagaaagctgtattagtcttttttacattgctataaagaaatacccgaggactgggtagtttagaaagaaaagaggtttatttttgctcatggttctgcagaccgtacaagaagcatgcatggtaccagcatctgcttctggtgaagaccttaggaagcttataatcatggtggaaggcgaagggggagcaaacaagagagagaaagtttccagtggggagggggcaggtcaagacagagggagcaagagagagacgagtgaggtcccagattctcttaacaatcagatctcacataaacttacagagggagaactcccttattactgtggggtgggaaccacgtcattcatgaggattccacccccatgacccaaacacctcccactagatcccagctgcaacactagagatcacttttcaacatgagatttggagggaacaaatatctaactatatgaaaagccaagggaaaaaaggagctggttcttcaaaaaggtcaataaagttgacaaacctctagcaagactgac

SEQ ID NO: 1129 - DNA, 560 bp, Homo sapiens
aaggctgacaacaaggcatgtatgttcacattcaccacttattaaacacagtgctaaaagttttagtgcaaaaggcaaataatggaaataaaaagcatacagattaaaaagtaagaaataaaactgtccctatttgcccatgccagaactatgtaaaaaatcccaacaaatctaaaacaacaacaaaaagataaccacaacaaaattcgtagaacaagtgagttcagcaaagttgcgtgataaaagataaacataaaaaatgtattttatgtgctaatgatggacaccaaaattaaaactataattctatgacatgaaaaacttaaatgtatatctagcaaaatacatataagacttagatgatcaaaactatacaatgctgatgaaaggaatcaaaggtgatctaaataaatgaagagatataccatgttcataaactggaagattcagtaaagatgtcagttcttccaaaattgatttacaaatttaatgcgattcttatcaaagtcccaacaagatttttgtagatatagcatgttgtaaaatatatatgaaaaggc

SEQ ID NO: 1130 - DNA, 561 bp, Homo sapiens; identical to SEQ ID NO: 1127

SEQ ID NO: 1131 - DNA, 653 bp, Homo sapiens
caataatctaagcatccagttaggaacctaggaaaaaaagagcaaaataaactgaaagccagtagaatcaaggaaataataaagagtagaaatcaatgaaattgaaaatagaaaaataatagagaaagctgtattagtcttttttacattgctataaagaaatacccgaggactgggtagtttagaaagaaaagaggtttatttttgctcatggttctgcaaaccgtacaagaagcatgcatggtaccagcatctgcttctggtgaagaccttaagaagcttataatcacggtggaaggcgaagggggagcaaacaagagagagaaaggttccagtggggagggggcaggtcaagagagagggagcaacagagagacgagtgaggtcccagattctcttaacaatcagatctcacataaacttacagagggagaactcccttattactgtggggcgggaaccacgtcattcatgagggttccacccccatgacccaaacacctcccactagatcccagctgcaacactagagatcacttttcaacatgagatttggagggaacaaatatctaactatatgaaaagccaagggaaaaaaggagctggttcttcaaaaaggtcaataaagttgacaaacctctagcaagactgac

SEQ ID NO: 1132 - DNA, 596 bp, Homo sapiens
taaagaacatatctaggtattaattctttagttgaaacattttgaatttatgacattaccatatcttaagcaattatttattgaatatatacagtgtcctgtttctttttgttcttctatttcttcttatccagttcaatattcaaccatgttccagttacaataacagaaggcttactgtaatgagaattgaaattcaaattctgagagtctgtattcgtaactaattatgtatgtgtcatagtttctcagaaaggtatgatattcatgaaaatggggattcagtttttcttcaaagataagttctatcatagtagaaaatagtgttattttcaaagcagcattactctaacttctgaagttattcatagttgaaggagaacattctttatttttaaacaaacatacatacacatccagtccatgcttattttggttgacttgataaattgtgggcaatatatgtgtatatatgggtcattaatgatgataggctaatataatatatttggggcacagacaaagtttcataatatattgttaaatggaaatcaaatagaccaaacatgcatgcagcataattgtatttttggtaa

SEQ ID NO: 1133 - DNA, 2411 bp, Homo sapiens
ctttgacccgtccacaccccccaagctcatgcccttctccaatcagctagaaatggtaagcgggggtcgctggcaagggtaagtgggttggaaacgcaggagaaagcaaaatgggggtggagagcctgggggttcagggggagtggtgacctgagcattcagactcctcaaaaccagagcggcaggggtgccggcggaagcctgtggccacaccgcagagatcaaacgtttcacaaaggaattagagcatcgctcagtccccctgaagcagaagtcttgggtcaggccataagcaaagagcacaggggatatgtgagctttctggagtcccactgaaatgtagctggattgtcaacgtaggatccaggcgtttgccaagcctcgggaaggagagggagccctgttctcatctggaagcacagatgaagaggatgcaggccgggagttaaccgcttctctccccgggagactcgtgggggtgggtgcggtcttctcatttgctgccctggtgtgcattagctccttgttcaagctgcgcctgggggcatctttgaatacaggctggagttttgtcatccatttaccagagattagggcaaaggaggcccaggcactgagaaatccagccctcacaccagctcaagccctcgtgcgtcccacgagtggacactgaaatcaattttcctattcagtcctctgccccttgccctggggaaatgaatccccggctttgatttactaggaaagagcctcttatgtttgcatagagcattcagcttttcaaattaaggggcttgtaaactgtgaagcactctaccagggaaaattacagttttaaaaaaggatcgtgatttggagtgagcctcccaaccctgtaaggaggccaggtccgtgtccttgctccaggcttaatggaagaggcagtgaacaggaagaagggatggacctaaagagggacagcaagctcggccagcctgatgccctaacttgccccacacagagacctagagcaggagcctcaagatggtatttatcacctcgggagggctggggcaagctggtggcaggttgctatttcatagaacaaagtgcccaagtcgccattagggtttttccttcctaagagagatgacattcagctgcttcaaagcaacaggcaaggtctgctgagacaattgaccaagaggggtgctgcgtgcgctcagagagcccagactggctcaaggtcggcacgcgtgcctggggagggagggtgcaatgcgcgcgcaggggaggcatgagtcaccgcggtccttttcctctacagggctccgagaagggtgcagtgaggcccacagccttcaagcctgtgctgccacggtcaggagccatcctgcactcctccccggagagtgccagccaccagctgcaccccgcccctccagacaagcccaaggagcaggagctgaagcctggcctgtgctctggggcgctgtcagactccggccggaactccatgtccagcctgcccacacacagcaccagcagcagctaccagctggacccgctggtcacacccgtgggacccacaagccgttttgggggctccgcccacaacatcacccagggcatcgtcctccaggacagcaacatgatgagcctgaaggctctgtccttctccgacggaggtagcaagctgggccactcgaacaaggcagacaagggcccctcgtgtgtccgctcccccatctccacggacgagtgcagcatccaggagctggagcagaagctgttggagagggagggcgccctccagaagctgcagcgcagctttgaggagaaggagcttgcctccagcctggcctacgaggagcggccgcggcgctgcagggacgagctggagggcccggagcccaaaggcggcaacaagctcaagcaggcctcgcagaagagccagcgcgcgcagcaggtcctgcacctgcaggtactgcagcttcagcaggagaagcggcagctccggcaggagctcgagagcctcatgaaggagcaggacctgctggagaccaagctcaggtcctacgagagggagaagaccagcttcggccccgcgctggaggagacccagtgggaggtgaggccacacagggctcatgggtttgggtggtcagcggtttggcgccagtacccccctctccttctggtgccggccaatagcgtgcaaacacagaccgcgcaggcaagcggggctaatgtgctggctttatcacccaaagaaggggctccctgcaaaccatgttgggggatcgacttacatctgagcttcctcctgtccccaccatcaccctcatggctcctagatttcagtttcccaagtgagccattaaatcatgaagccggaagccagatgaccaaggcccagccaggctgtgggc

SEQ ID NO: 1134 - DNA, 32174 bp, Homo sapiens
  SITE (29356): n equals a,t,g, or c
  SITE (29357): n equals a,t,g, or c
  SITE (29358): n equals a,t,g, or c
  SITE (29359): n equals a,t,g, or c
  SITE (29360): n equals a,t,g, or c
  SITE (29361): n equals a,t,g, or c
  SITE (29362): n equals a,t,g, or c
  SITE (29363): n equals a,t,g, or c
  SITE (29364): n equals a,t,g, or c
  SITE (29365): n equals a,t,g, or c
  SITE (29366): n equals a,t,g, or c
  SITE (29367): n equals a,t,g, or c
  SITE (29368): n equals a,t,g, or c
  SITE (29369): n equals a,t,g, or c
  SITE (29370): n equals a,t,g, or c
  SITE (29371): n equals a,t,g, or c
  SITE (29372): n equals a,t,g, or c
  SITE (29373): n equals a,t,g, or c
  SITE (29374): n equals a,t,g, or c
  SITE (29375): n equals a,t,g, or c
  SITE (29376): n equals a,t,g, or c
  SITE (29377): n equals a,t,g, or c
  SITE (29378): n equals a,t,g, or c
  SITE (29379): n equals a,t,g, or c
  SITE (29380): n equals a,t,g, or c
  SITE (29381): n equals a,t,g, or c
  SITE (29382): n equals a,t,g, or c
  SITE (29383): n equals a,t,g, or c
  SITE (29384): n equals a,t,g, or c
  SITE (29385): n equals a,t,g, or c
  SITE (29386): n equals a,t,g, or c
  SITE (29387): n equals a,t,g, or c
  SITE (29388): n equals a,t,g, or c
  SITE (29389): n equals a,t,g, or c
  SITE (29390): n equals a,t,g, or c
  SITE (29391): n equals a,t,g, or c
  SITE (29392): n equals a,t,g, or c
  SITE (29393): n equals a,t,g, or c
  SITE (29394): n equals a,t,g, or c
  SITE (29395): n equals a,t,g, or c
  SITE (29396): n equals a,t,g, or c
  SITE (29397): n equals a,t,g, or c
  SITE (29398): n equals a,t,g, or c
  SITE (29399): n equals a,t,g, or c
  SITE (29400): n equals a,t,g, or c
  SITE (29401): n equals a,t,g, or c
  SITE (29402): n equals a,t,g, or c
  SITE (29403): n equals a,t,g, or c
  SITE (29404): n equals a,t,g, or c
  SITE (29405): n equals a,t,g, or c
  SITE (29406): n equals a,t,g, or c
  SITE (29407): n equals a,t,g, or c
  SITE (29408): n equals a,t,g, or c
  SITE (29409): n equals a,t,g, or c
  SITE (29410): n equals a,t,g, or c
  SITE (29411): n equals a,t,g, or c
  SITE (29412): n equals a,t,g, or c
  SITE (29413): n equals a,t,g, or c
  SITE (29414): n equals a,t,g, or c
  SITE (29415): n equals a,t,g, or c
  SITE (29416): n equals a,t,g, or c
  SITE (29417): n equals a,t,g, or c
  SITE (29418): n equals a,t,g, or c
  SITE (29419): n equals a,t,g, or c
  SITE (29420): n equals a,t,g, or c
  SITE (29421): n equals a,t,g, or c
  SITE (29422): n equals a,t,g, or c
  SITE (29423): n equals a,t,g, or c
  SITE (29424): n equals a,t,g, or c
  SITE (29425): n equals a,t,g, or c
  SITE (29426): n equals a,t,g, or c
  SITE (29427): n equals a,t,g, or c
  SITE (29428): n equals a,t,g, or c
  SITE (29429): n equals a,t,g, or c
  SITE (29430): n equals a,t,g, or c
  SITE (29431): n equals a,t,g, or c
  SITE (29432): n equals a,t,g, or c
  SITE (29433): n equals a,t,g, or c
  SITE (29434): n equals a,t,g, or c
  SITE (29435): n equals a,t,g, or c
  SITE (29436): n equals a,t,g, or c
  SITE (29437): n equals a,t,g, or c
  SITE (29438): n equals a,t,g, or c
  SITE (29439): n equals a,t,g, or c
  SITE (29440): n equals a,t,g, or c
  SITE (29441): n equals a,t,g, or c
  SITE (29442): n equals a,t,g, or c
  SITE (29443): n equals a,t,g, or c
  SITE (29444): n equals a,t,g, or c
  SITE (29445): n equals a,t,g, or c
  SITE (29446): n equals a,t,g, or c
  SITE (29447): n equals a,t,g, or c
  SITE (29448): n equals a,t,g, or c
  SITE (29449): n equals a,t,g, or c
  SITE (29450): n equals a,t,g, or c
  SITE (29451): n equals a,t,g, or c
  SITE (29452): n equals a,t,g, or c
  SITE (29453): n equals a,t,g, or c
  SITE (29454): n equals a,t,g, or c
  SITE (29455): n equals a,t,g, or c
  SITE (29456): n equals a,t,g, or c
  SITE (29457): n equals a,t,g, or c
  SITE (29458): n equals a,t,g, or c
  SITE (29459): n equals a,t,g, or c
  SITE (29460): n equals a,t,g, or c
  SITE (29461): n equals a,t,g, or c
  SITE (29462): n equals a,t,g, or c
  SITE (29463): n equals a,t,g, or c
  SITE (29464): n equals a,t,g, or c
  SITE (29465): n equals a,t,g, or c
  SITE (29466): n equals a,t,g, or c
  SITE (29467): n equals a,t,g, or c
  SITE (29468): n equals a,t,g, or c
  SITE (29469): n equals a,t,g, or c
  SITE (29470): n equals a,t,g, or c
  SITE (29471): n equals a,t,g, or c
  SITE (29472): n equals a,t,g, or c
  SITE (29473): n equals a,t,g, or c
  SITE (29474): n equals a,t,g, or c
  SITE (29475): n equals a,t,g, or c
  SITE (29476): n equals a,t,g, or c
  SITE (29477): n equals a,t,g, or c
  SITE (29478): n equals a,t,g, or c
  SITE (29479): n equals a,t,g, or c
  SITE (29480): n equals a,t,g, or c
  SITE (29481): n equals a,t,g, or c
  SITE (29482): n equals a,t,g, or c
  SITE (29483): n equals a,t,g, or c
  SITE (29484): n equals a,t,g, or c
  SITE (29485): n equals a,t,g, or c
  SITE (29486): n equals a,t,g, or c
  SITE (29487): n equals a,t,g, or c
  SITE (29488): n equals a,t,g, or c
  SITE (29489): n equals a,t,g, or c
  SITE (29490): n equals a,t,g, or c
  SITE (29491): n equals a,t,g, or c
  SITE (29492): n equals a,t,g, or c
  SITE (29493): n equals a,t,g, or c
  SITE (29494): n equals a,t,g, or c
  SITE (29495): n equals a,t,g, or c
  SITE (29496): n equals a,t,g, or c
  SITE (29497): n equals a,t,g, or c
  SITE (29498): n equals a,t,g, or c
  SITE (29499): n equals a,t,g, or c
  SITE (29500): n equals a,t,g, or c
  SITE (29501): n equals a,t,g, or c
  SITE (29502): n equals a,t,g, or c
  SITE (29503): n equals a,t,g, or c
  SITE (29504): n equals a,t,g, or c
  SITE (29505): n equals a,t,g, or c
  SITE (29506): n equals a,t,g, or c
  SITE (29507): n equals a,t,g, or c
  SITE (29508): n equals a,t,g, or c
  SITE (29509): n equals a,t,g, or c
  SITE (29510): n equals a,t,g, or c
  SITE (29511): n equals a,t,g, or c
  SITE (29512): n equals a,t,g, or c
  SITE (29513): n equals a,t,g, or c
  SITE (29514): n equals a,t,g, or c
  SITE (29515): n equals a,t,g, or c
  SITE (29516): n equals a,t,g, or c
  SITE (29517): n equals a,t,g, or c
  SITE (29518): n equals a,t,g, or c
  SITE (29519): n equals a,t,g, or c
  SITE (29520): n equals a,t,g, or c
  SITE (29521): n equals a,t,g, or c
  SITE (29522): n equals a,t,g, or c
  SITE (29523): n equals a,t,g, or c
  SITE (29524): n equals a,t,g, or c
  SITE (29525): n equals a,t,g, or c
  SITE (29526): n equals a,t,g, or c
  SITE (29527): n equals a,t,g, or c
  SITE (29528): n equals a,t,g, or c
  SITE (29529): n equals a,t,g, or c
  SITE (29530): n equals a,t,g, or c
  SITE (29531): n equals a,t,g, or c
  SITE (29532): n equals a,t,g, or c
  SITE (29533): n equals a,t,g, or c
  SITE (29534): n equals a,t,g, or c
  SITE (29535): n equals a,t,g, or c
  SITE (29536): n equals a,t,g, or c
  SITE (29537): n equals a,t,g, or c
  SITE (29538): n equals a,t,g, or c
  SITE (29539): n equals a,t,g, or c
  SITE (29540): n equals a,t,g, or c
  SITE (29541): n equals a,t,g, or c
  SITE (29542): n equals a,t,g, or c
  SITE (29543): n equals a,t,g, or c
  SITE (29544): n equals a,t,g, or c
  SITE (29545): n equals a,t,g, or c
  SITE (29546): n equals a,t,g, or c
  SITE (29547): n equals a,t,g, or c
  SITE (29548): n equals a,t,g, or c
  SITE (29549): n equals a,t,g, or c
  SITE (29550): n equals a,t,g, or c
  SITE (29551): n equals a,t,g, or c
  SITE (29552): n equals a,t,g, or c
  SITE (29553): n equals a,t,g, or c
  SITE (29554): n equals a,t,g, or c
  SITE (29555): n equals a,t,g, or c
  SITE (29556): n equals a,t,g, or c
  SITE (29557): n equals a,t,g, or c
  SITE (29558): n equals a,t,g, or c
  SITE (29559): n equals a,t,g, or c
  SITE (29560): n equals a,t,g, or c
  SITE (29561): n equals a,t,g, or c
  SITE (29562): n equals a,t,g, or c
  SITE (29563): n equals a,t,g, or c
  SITE (29564): n equals a,t,g, or c
  SITE (29565): n equals a,t,g, or c
  SITE (29566): n equals a,t,g, or c
  SITE (29567): n equals a,t,g, or c
  SITE (29568): n equals a,t,g, or c
  SITE (29569): n equals a,t,g, or c
  SITE (29570): n equals a,t,g, or c
  SITE (29571): n equals a,t,g, or c
  SITE (29572): n equals a,t,g, or c
  SITE (29573): n equals a,t,g, or c
  SITE (29574): n equals a,t,g, or c
  SITE (29575): n equals a,t,g, or c
  SITE (29576): n equals a,t,g, or c
  SITE (29577): n equals a,t,g, or c
  SITE (29578): n equals a,t,g, or c
  SITE (29579): n equals a,t,g, or c
  SITE (29580): n equals a,t,g, or c
  SITE (29581): n equals a,t,g, or c
  SITE (29582): n equals a,t,g, or c
  SITE (29583): n equals a,t,g, or c
  SITE (29584): n equals a,t,g, or c
  SITE (29585): n equals a,t,g, or c
  SITE (29586): n equals a,t,g, or c
  SITE (29587): n equals a,t,g, or c
  SITE (29588): n equals a,t,g, or c
  SITE (29589): n equals a,t,g, or c
  SITE (29590): n equals a,t,g, or c
  SITE (29591): n equals a,t,g, or c
  SITE (29592): n equals a,t,g, or c
  SITE (29593): n equals a,t,g, or c
  SITE (29594): n equals a,t,g, or c
  SITE (29595): n equals a,t,g, or c
  SITE (29596): n equals a,t,g, or c
  SITE (29597): n equals a,t,g, or c
  SITE (29598): n equals a,t,g, or c
  SITE (29599): n equals a,t,g, or c
  SITE (29600): n equals a,t,g, or c
  SITE (29601): n equals a,t,g, or c
  SITE (29602): n equals a,t,g, or c
  SITE (29603): n equals a,t,g, or c
  SITE (29604): n equals a,t,g, or c
  SITE (29605): n equals a,t,g, or c
  SITE (29606): n equals a,t,g, or c
  SITE (29607): n equals a,t,g, or c
  SITE (29608): n equals a,t,g, or c
  SITE (29609): n equals a,t,g, or c
  SITE (29610): n equals a,t,g, or c
  SITE (29611): n equals a,t,g, or c
  SITE (29612): n equals a,t,g, or c
  SITE (29613): n equals a,t,g, or c
  SITE (29614): n equals a,t,g, or c
  SITE (29615): n equals a,t,g, or c
  SITE (29616): n equals a,t,g, or c
  SITE (29617): n equals a,t,g, or c
  SITE (29618): n equals a,t,g, or c
  SITE (29619): n equals a,t,g, or c
  SITE (29620): n equals a,t,g, or c
  SITE (29621): n equals a,t,g, or c
  SITE (29622): n equals a,t,g, or c
  SITE (29623): n equals a,t,g, or c
  SITE (29624): n equals a,t,g, or c
  SITE (29625): n equals a,t,g, or c
  SITE (29626): n equals a,t,g, or c
  SITE (29627): n equals a,t,g, or c
  SITE (29628): n equals a,t,g, or c
  SITE (29629): n equals a,t,g, or c
  SITE (29630): n equals a,t,g, or c
  SITE (29631): n equals a,t,g, or c
  SITE (29632): n equals a,t,g, or c
  SITE (29633): n equals a,t,g, or c
  SITE (29634): n equals a,t,g, or c
  SITE (29635): n equals a,t,g, or c
  SITE (29636): n equals a,t,g, or c
  SITE (29637): n equals a,t,g, or c
  SITE (29638): n equals a,t,g, or c
  SITE (29639): n equals a,t,g, or c
  SITE (29640): n equals a,t,g, or c
  SITE (29641): n equals a,t,g, or c
  SITE (29642): n equals a,t,g, or c
  SITE (29643): n equals a,t,g, or c
  SITE (29644): n equals a,t,g, or c
  SITE (29645): n equals a,t,g, or c
  SITE (29646): n equals a,t,g, or c
  SITE (29647): n equals a,t,g, or c
  SITE (29648): n equals a,t,g, or c
  SITE (29649): n equals a,t,g, or c
  SITE (29650): n equals a,t,g, or c
  SITE (29651): n equals a,t,g, or c
  SITE (29652): n equals a,t,g, or c
  SITE (29653): n equals a,t,g, or c
  SITE (29654): n equals a,t,g, or c
  SITE (29655): n equals a,t,g, or c
  SITE (29656): n equals a,t,g, or c
  SITE (29657): n equals a,t,g, or c
  SITE (29658): n equals a,t,g, or c
  SITE (29659): n equals a,t,g, or c
  SITE (29660): n equals a,t,g, or c
  SITE (29661): n equals a,t,g, or c
  SITE (29662): n equals a,t,g, or c
  SITE (29663): n equals a,t,g, or c
  SITE (29664): n equals a,t,g, or c
  SITE (29665): n equals a,t,g, or c
  SITE (29666): n equals a,t,g, or c
  SITE (29667): n equals a,t,g, or c
  SITE (29668): n equals a,t,g, or c
  SITE (29669): n equals a,t,g, or c
  SITE (29670): n equals a,t,g, or c
  SITE (29671): n equals a,t,g, or c
  SITE (29672): n equals a,t,g, or c
  SITE (29673): n equals a,t,g, or c
  SITE (29674): n equals a,t,g, or c
  SITE (29675): n equals a,t,g, or c
  SITE (29676): n equals a,t,g, or c
  SITE (29677): n equals a,t,g, or c
  SITE (29678): n equals a,t,g, or c
  SITE (29679): n equals a,t,g, or c
  SITE (29680): n equals a,t,g, or c
  SITE (29681): n equals a,t,g, or c
  SITE (29682): n equals a,t,g, or c
  SITE (29683): n equals a,t,g, or c
  SITE (29684): n equals a,t,g, or c
  SITE (29685): n equals a,t,g, or c
  SITE (29686): n equals a,t,g, or c
  SITE (29687): n equals a,t,g, or c
  SITE (29688): n equals a,t,g, or c
  SITE (29689): n equals a,t,g, or c
  SITE (29690): n equals a,t,g, or c
  SITE (29691): n equals a,t,g, or c
  SITE (29692): n equals a,t,g, or c
  SITE (29693): n equals a,t,g, or c
  SITE (29694): n equals a,t,g, or c
  SITE (29695): n equals a,t,g, or c
  SITE (29696): n equals a,t,g, or c
  SITE (29697): n equals a,t,g, or c
  SITE (29698): n equals a,t,g, or c
  SITE (29699): n equals a,t,g, or c
  SITE (29700): n equals a,t,g, or c
  SITE (29701): n equals a,t,g, or c
  SITE (29702): n equals a,t,g, or c
  SITE (29703): n equals a,t,g, or c
  SITE (29704): n equals a,t,g, or c
  SITE (29705): n equals a,t,g, or c
  SITE (29706): n equals a,t,g, or c
  SITE (29707): n equals a,t,g, or c
  SITE (29708): n equals a,t,g, or c
  SITE (29709): n equals a,t,g, or c
  SITE (29710): n equals a,t,g, or c
  SITE (29711): n equals a,t,g, or c
  SITE (29712): n equals a,t,g, or c
  SITE (29713): n equals a,t,g, or c
  SITE (29714): n equals a,t,g, or c
  SITE (29715): n equals a,t,g, or c
  SITE (29716): n equals a,t,g, or c
  SITE (29717): n equals a,t,g, or c
  SITE (29718): n equals a,t,g, or c
  SITE (29719): n equals a,t,g, or c
  SITE (29720): n equals a,t,g, or c
  SITE (29721): n equals a,t,g, or c
  SITE (29722): n equals a,t,g, or c
  SITE (29723): n equals a,t,g, or c
  SITE (29724): n equals a,t,g, or c
  SITE (29725): n equals a,t,g, or c
  SITE (29726): n equals a,t,g, or c
  SITE (29727): n equals a,t,g, or c
  SITE (29728): n equals a,t,g, or c
  SITE (29729): n equals a,t,g, or c
  SITE (29730): n equals a,t,g, or c
  SITE (29731): n equals a,t,g, or c
  SITE (29732): n equals a,t,g, or c
  SITE (29733): n equals a,t,g, or c
  SITE (29734): n equals a,t,g, or c
  SITE (29735): n equals a,t,g, or c
  SITE (29736): n equals a,t,g, or c
  SITE (29737): n equals a,t,g, or c
  SITE (29738): n equals a,t,g, or c
  SITE (29739): n equals a,t,g, or c
  SITE (29740): n equals a,t,g, or c
  SITE (29741): n equals a,t,g, or c
  SITE (29742): n equals a,t,g, or c
  SITE (29743): n equals a,t,g, or c
  SITE (29744): n equals a,t,g, or c
  SITE (29745): n equals a,t,g, or c
  SITE (29746): n equals a,t,g, or c
  SITE (29747): n equals a,t,g, or c
  SITE (29748): n equals a,t,g, or c
  SITE (29749): n equals a,t,g, or c
  SITE (29750): n equals a,t,g, or c
  SITE (29751): n equals a,t,g, or c
  SITE (29752): n equals a,t,g, or c
  SITE (29753): n equals a,t,g, or c
  SITE (29754): n equals a,t,g, or c
  SITE (29755): n equals a,t,g, or c
  SITE (29756): n equals a,t,g, or c
  SITE (29757): n equals a,t,g, or c
  SITE (29758): n equals a,t,g, or c
  SITE (29759): n equals a,t,g, or c
  SITE (29760): n equals a,t,g, or c
  SITE (29761): n equals a,t,g, or c
  SITE (29762): n equals a,t,g, or c
  SITE (29763): n equals a,t,g, or c
  SITE (29764): n equals a,t,g, or c
  SITE (29765): n equals a,t,g, or c
  SITE (29766): n equals a,t,g, or c
  SITE (29767): n equals a,t,g, or c
  SITE (29768): n equals a,t,g, or c
  SITE (29769): n equals a,t,g, or c
  SITE (29770): n equals a,t,g, or c
  SITE (29771): n equals a,t,g, or c
  SITE (29772): n equals a,t,g, or c
  SITE (29773): n equals a,t,g, or c
  SITE (29774): n equals a,t,g, or c
  SITE (29775): n equals a,t,g, or c
  SITE (29776): n equals a,t,g, or c
  SITE (29777): n equals a,t,g, or c
  SITE (29778): n equals a,t,g, or c
  SITE (29779): n equals a,t,g, or c
  SITE (29780): n equals a,t,g, or c
  SITE (29781): n equals a,t,g, or c
  SITE (29782): n equals a,t,g, or c
  SITE (29783): n equals a,t,g, or c
  SITE (29784): n equals a,t,g, or c
  SITE (29785): n equals a,t,g, or c
  SITE (29786): n equals a,t,g, or c
  SITE (29787): n equals a,t,g, or c
  SITE (29788): n equals a,t,g, or c
  SITE (29789): n equals a,t,g, or c
  SITE (29790): n equals a,t,g, or c
  SITE (29791): n equals a,t,g, or c
  SITE (29792): n equals a,t,g, or c
  SITE (29793): n equals a,t,g, or c
  SITE (29794): n equals a,t,g, or c
  SITE (29795): n equals a,t,g, or c
  SITE (29796): n equals a,t,g, or c
  SITE (29797): n equals a,t,g, or c
  SITE (29798): n equals a,t,g, or c
  SITE (29799): n equals a,t,g, or c
  SITE (29800): n equals a,t,g, or c
  SITE (29801): n equals a,t,g, or c
  SITE (29802): n equals a,t,g, or c
  SITE (29803): n equals a,t,g, or c
  SITE (29804): n equals a,t,g, or c
  SITE (29805): n equals a,t,g, or c
  SITE (29806): n equals a,t,g, or c
  SITE (29807): n equals a,t,g, or c
  SITE (29808): n equals a,t,g, or c
  SITE (29809): n equals a,t,g, or c
  SITE (29810): n equals a,t,g, or c
  SITE (29811): n equals a,t,g, or c
  SITE (29812): n equals a,t,g, or c
  SITE (29813): n equals a,t,g, or c
  SITE (29814): n equals a,t,g, or c
  SITE (29815): n equals a,t,g, or c
  SITE (29816): n equals a,t,g, or c
  SITE (29817): n equals a,t,g, or c
  SITE (29818): n equals a,t,g, or c
  SITE (29819): n equals a,t,g, or c
  SITE (29820): n equals a,t,g, or c
  SITE (29821): n equals a,t,g, or c
  SITE (29822): n equals a,t,g, or c
  SITE (29823): n equals a,t,g, or c
  SITE (29824): n equals a,t,g, or c
  SITE (29825): n equals a,t,g, or c
  SITE (29826): n equals a,t,g, or c
  SITE (29827): n equals a,t,g, or c
  SITE (29828): n equals a,t,g, or c
  SITE (29829): n equals a,t,g, or c
  SITE (29830): n equals a,t,g, or c
  SITE (29831): n equals a,t,g, or c
  SITE (29832): n equals a,t,g, or c
  SITE (29833): n equals a,t,g, or c
  SITE (29834): n equals a,t,g, or c
  SITE (29835): n equals a,t,g, or c
  SITE (29836): n equals a,t,g, or c
  SITE (29837): n equals a,t,g, or c
  SITE (29838): n equals a,t,g, or c
  SITE (29839): n equals a,t,g, or c
  SITE (29840): n equals a,t,g, or c
  SITE (29841): n equals a,t,g, or c
  SITE (29842): n equals a,t,g, or c
  SITE (29843): n equals a,t,g, or c
  SITE (29844): n equals a,t,g, or c
  SITE (29845): n equals a,t,g, or c
  SITE (29846): n equals a,t,g, or c
  SITE (29847): n equals a,t,g, or c
  SITE (29848): n equals a,t,g, or c
  SITE (29849): n equals a,t,g, or c
  SITE (29850): n equals a,t,g, or c
  SITE (29851): n equals a,t,g, or c
  SITE (29852): n equals a,t,g, or c
  SITE (29853): n equals a,t,g, or c
  SITE (29854): n equals a,t,g, or c
  SITE (29855): n equals a,t,g, or c
  SITE (29856): n equals a,t,g, or c
  SITE (29857): n equals a,t,g, or c
  SITE (29858): n equals a,t,g, or c
  SITE (29859): n equals a,t,g, or c
  SITE (29860): n equals a,t,g, or c
  SITE (29861): n equals a,t,g, or c
  SITE (29862): n equals a,t,g, or c
  SITE (29863): n equals a,t,g, or c
  SITE (29864): n equals a,t,g, or c
  SITE (29865): n equals a,t,g, or c
  SITE (29866): n equals a,t,g, or c
  SITE (29867): n equals a,t,g, or c
  SITE (29868): n equals a,t,g, or c
  SITE (29869): n equals a,t,g, or c
  SITE (29870): n equals a,t,g, or c
  SITE (29871): n equals a,t,g, or c
  SITE (29872): n equals a,t,g, or c
  SITE (29873): n equals a,t,g, or c
  SITE (29874): n equals a,t,g, or c
  SITE (29875): n equals a,t,g, or c
  SITE (29876): n equals a,t,g, or c
  SITE (29877): n equals a,t,g, or c
  SITE (29878): n equals a,t,g, or c
  SITE (29879): n equals a,t,g, or c
  SITE (29880): n equals a,t,g, or c
  SITE (29881): n equals a,t,g, or c
  SITE (29882): n equals a,t,g, or c
  SITE (29883): n equals a,t,g, or c
  SITE (29884): n equals a,t,g, or c
  SITE (29885): n equals a,t,g, or c
  SITE (29886): n equals a,t,g, or c
  SITE (29887): n equals a,t,g, or c
  SITE (29888): n equals a,t,g, or c
  SITE (29889): n equals a,t,g, or c
  SITE (29890): n equals a,t,g, or c
  SITE (29891): n equals a,t,g, or c
  SITE (29892): n equals a,t,g, or c
  SITE (29893): n equals a,t,g, or c
  SITE (29894): n equals a,t,g, or c
  SITE (29895): n equals a,t,g, or c
  SITE (29896): n equals a,t,g, or c
  SITE (29897): n equals a,t,g, or c
  SITE (29898): n equals a,t,g, or c
  SITE (29899): n equals a,t,g, or c
  SITE (29900): n equals a,t,g, or c
  SITE (29901): n equals a,t,g, or c
  SITE (29902): n equals a,t,g, or c
  SITE (29903): n equals a,t,g, or c
  SITE (29904): n equals a,t,g, or c
  SITE (29905): n equals a,t,g, or c
  SITE (29906): n equals a,t,g, or c
  SITE (29907): n equals a,t,g, or c
  SITE (29908): n equals a,t,g, or c
  SITE (29909): n equals a,t,g, or c
  SITE (29910): n equals a,t,g, or c
  SITE (29911): n equals a,t,g, or c
  SITE (29912): n equals a,t,g, or c
  SITE (29913): n equals a,t,g, or c
  SITE (29914): n equals a,t,g, or c
  SITE (29915): n equals a,t,g, or c
  SITE (29916): n equals a,t,g, or c
  SITE (29917): n equals a,t,g, or c
  SITE (29918): n equals a,t,g, or c
  SITE (29919): n equals a,t,g, or c
  SITE (29920): n equals a,t,g, or c
  SITE (29921): n equals a,t,g, or c
  SITE (29922): n equals a,t,g, or c
  SITE (29923): n equals a,t,g, or c
  SITE (29924): n equals a,t,g, or c
  SITE (29925): n equals a,t,g, or c
  SITE (29926): n equals a,t,g, or c
  SITE (29927): n equals a,t,g, or c
  SITE (29928): n equals a,t,g, or c
  SITE (29929): n equals a,t,g, or c
  SITE (29930): n equals a,t,g, or c
  SITE (29931): n equals a,t,g, or c
  SITE (29932): n equals a,t,g, or c
  SITE (29933): n equals a,t,g, or c
  SITE (29934): n equals a,t,g, or c
  SITE (29935): n equals a,t,g, or c
  SITE (29936): n equals a,t,g, or c
  SITE (29937): n equals a,t,g, or c
  SITE (29938): n equals a,t,g, or c
  SITE (29939): n equals a,t,g, or c
  SITE (29940): n equals a,t,g, or c
  SITE (29941): n equals a,t,g, or c
  SITE (29942): n equals a,t,g, or c
  SITE (29943): n equals a,t,g, or c
  SITE (29944): n equals a,t,g, or c
  SITE (29945): n equals a,t,g, or c
  SITE (29946): n equals a,t,g, or c
  SITE (29947): n equals a,t,g, or c
  SITE (29948): n equals a,t,g, or c
  SITE (29949): n equals a,t,g, or c
  SITE (29950): n equals a,t,g, or c
  SITE (29951): n equals a,t,g, or c
  SITE (29952): n equals a,t,g, or c
  SITE (29953): n equals a,t,g, or c
  SITE (29954): n equals a,t,g, or c
  SITE (29955): n equals a,t,g, or c
  SITE (29956): n equals a,t,g, or c
  SITE (29957): n equals a,t,g, or c
  SITE (29958): n equals a,t,g, or c
  SITE (29959): n equals a,t,g, or c
  SITE (29960): n equals a,t,g, or c
  SITE (29961): n equals a,t,g, or c
  SITE (29962): n equals a,t,g, or c
  SITE (29963): n equals a,t,g, or c
  SITE (29964): n equals a,t,g, or c
  SITE (29965): n equals a,t,g, or c
  SITE (29966): n equals a,t,g, or c
  SITE (29967): n equals a,t,g, or c
  SITE (29968): n equals a,t,g, or c
  SITE (29969): n equals a,t,g, or c
  SITE (29970): n equals a,t,g, or c
  SITE (29971): n equals a,t,g, or c
  SITE (29972): n equals a,t,g, or c
  SITE (29973): n equals a,t,g, or c
  SITE (29974): n equals a,t,g, or c
  SITE (29975): n equals a,t,g, or c
  SITE (29976): n equals a,t,g, or c
  SITE (29977): n equals a,t,g, or c
  SITE (29978): n equals a,t,g, or c
  SITE (29979): n equals a,t,g, or c
  SITE (29980): n equals a,t,g, or c
  SITE (29981): n equals a,t,g, or c
  SITE (29982): n equals a,t,g, or c
  SITE (29983): n equals a,t,g, or c
  SITE (29984): n equals a,t,g, or c
  SITE (29985): n equals a,t,g, or c
  SITE (29986): n equals a,t,g, or c
  SITE (29987): n equals a,t,g, or c
  SITE (29988): n equals a,t,g, or c
  SITE (29989): n equals a,t,g, or c
  SITE (29990): n equals a,t,g, or c
  SITE (29991): n equals a,t,g, or c
  SITE (29992): n equals a,t,g, or c
  SITE (29993): n equals a,t,g, or c
  SITE (29994): n equals a,t,g, or c
  SITE (29995): n equals a,t,g, or c
  SITE (29996): n equals a,t,g, or c
  SITE (29997): n equals a,t,g, or c
  SITE (29998): n equals a,t,g, or c
  SITE (29999): n equals a,t,g, or c
  SITE (30000): n equals a,t,g, or c
  SITE (30001): n equals a,t,g, or c
  SITE (30002): n equals a,t,g, or c
  SITE (30003): n equals a,t,g, or c
  SITE (30004): n equals a,t,g, or c
  SITE (30005): n equals a,t,g, or c
  SITE (30006): n equals a,t,g, or c
  SITE (30007): n equals a,t,g, or c
  SITE (30008): n equals a,t,g, or c
  SITE (30009): n equals a,t,g, or c
  SITE (30010): n equals a,t,g, or c
  SITE (30011): n equals a,t,g, or c
  SITE (30012): n equals a,t,g, or c
  SITE (30013): n equals a,t,g, or c
  SITE (30014): n equals a,t,g, or c
  SITE (30015): n equals a,t,g, or c
  SITE (30016): n equals a,t,g, or c
  SITE (30017): n equals a,t,g, or c
  SITE (30018): n equals a,t,g, or c
  SITE (30019): n equals a,t,g, or c
  SITE (30020): n equals a,t,g, or c
  SITE (30021): n equals a,t,g, or c
  SITE (30022): n equals a,t,g, or c
  SITE (30023): n equals a,t,g, or c
  SITE (30024): n equals a,t,g, or c
  SITE (30025): n equals a,t,g, or c
  SITE (30026): n equals a,t,g, or c
  SITE (30027): n equals a,t,g, or c
  SITE (30028): n equals a,t,g, or c
  SITE (30029): n equals a,t,g, or c
  SITE (30030): n equals a,t,g, or c
  SITE (30031): n equals a,t,g, or c
  SITE (30032): n equals a,t,g, or c
  SITE (30033): n equals a,t,g, or c
  SITE (30034): n equals a,t,g, or c
  SITE (30035): n equals a,t,g, or c
  SITE (30036): n equals a,t,g, or c
  SITE (30037): n equals a,t,g, or c
  SITE (30038): n equals a,t,g, or c
  SITE (30039): n equals a,t,g, or c
  SITE (30040): n equals a,t,g, or c
  SITE (30041): n equals a,t,g, or c
  SITE (30042): n equals a,t,g, or c
  SITE (30043): n equals a,t,g, or c
  SITE (30044): n equals a,t,g, or c
  SITE (30045): n equals a,t,g, or c
  SITE (30046): n equals a,t,g, or c
  SITE (30047): n equals a,t,g, or c
  SITE (30048): n equals a,t,g, or c
  SITE (30049): n equals a,t,g, or c
  SITE (30050): n equals a,t,g, or c
  SITE (30051): n equals a,t,g, or c
  SITE (30052): n equals a,t,g, or c
  SITE (30053): n equals a,t,g, or c
  SITE (30054): n equals a,t,g, or c
  SITE (30055): n equals a,t,g, or c
  SITE (30056): n equals a,t,g, or c
  SITE (30057): n equals a,t,g, or c
  SITE (30058): n equals a,t,g, or c
  SITE (30059): n equals a,t,g, or c
  SITE (30060): n equals a,t,g, or c
  SITE (30061): n equals a,t,g, or c
  SITE (30062): n equals a,t,g, or c
  SITE (30063): n equals a,t,g, or c
  SITE (30064): n equals a,t,g, or c
  SITE (30065): n equals a,t,g, or c
  SITE (30066): n equals a,t,g, or c
  SITE (30067): n equals a,t,g, or c
  SITE (30068): n equals a,t,g, or c
  SITE (30069): n equals a,t,g, or c
  SITE (30070): n equals a,t,g, or c
  SITE (30071): n equals a,t,g, or c
  SITE (30072): n equals a,t,g, or c
  SITE (30073): n equals a,t,g, or c
  SITE (30074): n equals a,t,g, or c
  SITE (30075): n equals a,t,g, or c
  SITE (30076): n equals a,t,g, or c
  SITE (30077): n equals a,t,g, or c
  SITE (30078): n equals a,t,g, or c
  SITE (30079): n equals a,t,g, or c
  SITE (30080): n equals a,t,g, or c
  SITE (30081): n equals a,t,g, or c
  SITE (30082): n equals a,t,g, or c
  SITE (30083): n equals a,t,g, or c
  SITE (30084): n equals a,t,g, or c
  SITE (30085): n equals a,t,g, or c
  SITE (30086): n equals a,t,g, or c
  SITE (30087): n equals a,t,g, or c
  SITE (30088): n equals a,t,g, or c
  SITE (30089): n equals a,t,g, or c
  SITE (30090): n equals a,t,g, or c
  SITE (30091): n equals a,t,g, or c
  SITE (30092): n equals a,t,g, or c
  SITE (30093): n equals a,t,g, or c
  SITE (30094): n equals a,t,g, or c
  SITE (30095): n equals a,t,g, or c
  SITE (30096): n equals a,t,g, or c
  SITE (30097): n equals a,t,g, or c
  SITE (30098): n equals a,t,g, or c
  SITE (30099): n equals a,t,g, or c
  SITE (30100): n equals a,t,g, or c
  SITE (30101): n equals a,t,g, or c
  SITE (30102): n equals a,t,g, or c
  SITE (30103): n equals a,t,g, or c
  SITE (30104): n equals a,t,g, or c
  SITE (30105): n equals a,t,g, or c
  SITE (30106): n equals a,t,g, or c
  SITE (30107): n equals a,t,g, or c
  SITE (30108): n equals a,t,g, or c
  SITE (30109): n equals a,t,g, or c
  SITE (30110): n equals a,t,g, or c
  SITE (30111): n equals a,t,g, or c
  SITE (30112): n equals a,t,g, or c
  SITE (30113): n equals a,t,g, or c
  SITE (30114): n equals a,t,g, or c
  SITE (30115): n equals a,t,g, or c
  SITE (30116): n equals a,t,g, or c
  SITE (30117): n equals a,t,g, or c
  SITE (30118): n equals a,t,g, or c
  SITE (30119): n equals a,t,g, or c
  SITE (30120): n equals a,t,g, or c
  SITE (30121): n equals a,t,g, or c
  SITE (30122): n equals a,t,g, or c
  SITE (30123): n equals a,t,g, or c
  SITE (30124): n equals a,t,g, or c
  SITE (30125): n equals a,t,g, or c
  SITE (30126): n equals a,t,g, or c
  SITE (30127): n equals a,t,g, or c
  SITE (30128): n equals a,t,g, or c
  SITE (30129): n equals a,t,g, or c
  SITE (30130): n equals a,t,g, or c
  SITE (30131): n equals a,t,g, or c
  SITE (30132): n equals a,t,g, or c
  SITE (30133): n equals a,t,g, or c
  SITE (30134): n equals a,t,g, or c
  SITE (30135): n equals a,t,g, or c
  SITE (30136): n equals a,t,g, or c
  SITE (30137): n equals a,t,g, or c
  SITE (30138): n equals a,t,g, or c
  SITE (30139): n equals a,t,g, or c
  SITE (30140): n equals a,t,g, or c
  SITE (30141): n equals a,t,g, or c
  SITE (30142): n equals a,t,g, or c
  SITE (30143): n equals a,t,g, or c
  SITE (30144): n equals a,t,g, or c
  SITE (30145): n equals a,t,g, or c
  SITE (30146): n equals a,t,g, or c
  SITE (30147): n equals a,t,g, or c
  SITE (30148): n equals a,t,g, or c
  SITE (30149): n equals a,t,g, or c
  SITE (30150): n equals a,t,g, or c
  SITE (30151): n equals a,t,g, or c
  SITE (30152): n equals a,t,g, or c
  SITE (30153): n equals a,t,g, or c
  SITE (30154): n equals a,t,g, or c
  SITE (30155): n equals a,t,g, or c
  SITE (30156): n equals a,t,g, or c
  SITE (30157): n equals a,t,g, or c
  SITE (30158): n equals a,t,g, or c
  SITE (30159): n equals a,t,g, or c
  SITE (30160): n equals a,t,g, or c
  SITE (30161): n equals a,t,g, or c
  SITE (30162): n equals a,t,g, or c
  SITE (30163): n equals a,t,g, or c
  SITE (30164): n equals a,t,g, or c
  SITE (30165): n equals a,t,g, or c
  SITE (30166): n equals a,t,g, or c
  SITE (30167): n equals a,t,g, or c
  SITE (30168): n equals a,t,g, or c
  SITE (30169): n equals a,t,g, or c
  SITE (30170): n equals a,t,g, or c
  SITE (30171): n equals a,t,g, or c
  SITE (30172): n equals a,t,g, or c
  SITE (30173): n equals a,t,g, or c
  SITE (30174): n equals a,t,g, or c
  SITE (30175): n equals a,t,g, or c
  SITE (30176): n equals a,t,g, or c
  SITE (30177): n equals a,t,g, or c
  SITE (30178): n equals a,t,g, or c
  SITE (30179): n equals a,t,g, or c
  SITE (30180): n equals a,t,g, or c
  SITE (30181): n equals a,t,g, or c
  SITE (30182): n equals a,t,g, or c
  SITE (30183): n equals a,t,g, or c
  SITE (30184): n equals a,t,g, or c
  SITE (30185): n equals a,t,g, or c
  SITE (30186): n equals a,t,g, or c
  SITE (30187): n equals a,t,g, or c
  SITE (30188): n equals a,t,g, or c
  SITE (30189): n equals a,t,g, or c
  SITE (30190): n equals a,t,g, or c
  SITE (30191): n equals a,t,g, or c
  SITE (30192): n equals a,t,g, or c
  SITE (30193): n equals a,t,g, or c
  SITE (30194): n equals a,t,g, or c
  SITE (30195): n equals a,t,g, or c
  SITE (30196): n equals a,t,g, or c
  SITE (30197): n equals a,t,g, or c
  SITE (30198): n equals a,t,g, or c
  SITE (30199): n equals a,t,g, or c
  SITE (30200): n equals a,t,g, or c
  SITE (30201): n equals a,t,g, or c
  SITE (30202): n equals a,t,g, or c
  SITE (30203): n equals a,t,g, or c
  SITE (30204): n equals a,t,g, or c
  SITE (30205): n equals a,t,g, or c
  SITE (30206): n equals a,t,g, or c
  SITE (30207): n equals a,t,g, or c
  SITE (30208): n equals a,t,g, or c
  SITE (30209): n equals a,t,g, or c
  SITE (30210): n equals a,t,g, or c
  SITE (30211): n equals a,t,g, or c
  SITE (30212): n equals a,t,g, or c
  SITE (30213): n equals a,t,g, or c
  SITE (30214): n equals a,t,g, or c
  SITE (30215): n equals a,t,g, or c
  SITE (30216): n equals a,t,g, or c
  SITE (30217): n equals a,t,g, or c
  SITE (30218): n equals a,t,g, or c
  SITE (30219): n equals a,t,g, or c
  SITE (30220): n equals a,t,g, or c
  SITE (30221): n equals a,t,g, or c
  SITE (30222): n equals a,t,g, or c
  SITE (30223): n equals a,t,g, or c
  SITE (30224): n equals a,t,g, or c
  SITE (30225): n equals a,t,g, or c
  SITE (30226): n equals a,t,g, or c
  SITE (30227): n equals a,t,g, or c
  SITE (30228): n equals a,t,g, or c
  SITE (30229): n equals a,t,g, or c
  SITE (30230): n equals a,t,g, or c
  SITE (30231): n equals a,t,g, or c
  SITE (30232): n equals a,t,g, or c
  SITE (30233): n equals a,t,g, or c
  SITE (30234): n equals a,t,g, or c
  SITE (30235): n equals a,t,g, or c
  SITE (30236): n equals a,t,g, or c
  SITE (30237): n equals a,t,g, or c
  SITE (30238): n equals a,t,g, or c
  SITE (30239): n equals a,t,g, or c
  SITE (30240): n equals a,t,g, or c
  SITE (30241): n equals a,t,g, or c
  SITE (30242): n equals a,t,g, or c
  SITE (30243): n equals a,t,g, or c
  SITE (30244): n equals a,t,g, or c
  SITE (30245): n equals a,t,g, or c
  SITE (30246): n equals a,t,g, or c
  SITE (30247): n equals a,t,g, or c
  SITE (30248): n equals a,t,g, or c
  SITE (30249): n equals a,t,g, or c
  SITE (30250): n equals a,t,g, or c
  SITE (30251): n equals a,t,g, or c
  SITE (30252): n equals a,t,g, or c
  SITE (30253): n equals a,t,g, or c
  SITE (30254): n equals a,t,g, or c
  SITE (30255): n equals a,t,g, or c
  SITE (30256): n equals a,t,g, or c
  SITE (30257): n equals a,t,g, or c
  SITE (30258): n equals a,t,g, or c
  SITE (30259): n equals a,t,g, or c
  SITE (30260): n equals a,t,g, or c
  SITE (30261): n equals a,t,g, or c
  SITE (30262): n equals a,t,g, or c
  SITE (30263): n equals a,t,g, or c
  SITE (30264): n equals a,t,g, or c
  SITE (30265): n equals a,t,g, or c
  SITE (30266): n equals a,t,g, or c
  SITE (30267): n equals a,t,g, or c
  SITE (30268): n equals a,t,g, or c
  SITE (30269): n equals a,t,g, or c
  SITE (30270): n equals a,t,g, or c
  SITE (30271): n equals a,t,g, or c
  SITE (30272): n equals a,t,g, or c
  SITE (30273): n equals a,t,g, or c
  SITE (30274): n equals a,t,g, or c
  SITE (30275): n equals a,t,g, or c
  SITE (30276): n equals a,t,g, or c
  SITE (30277): n equals a,t,g, or c
  SITE (30278): n equals a,t,g, or c
  SITE (30279): n equals a,t,g, or c
  SITE (30280): n equals a,t,g, or c
  SITE (30281): n equals a,t,g, or c
  SITE (30282): n equals a,t,g, or c
  SITE (30283): n equals a,t,g, or c
  SITE (30284): n equals a,t,g, or c
  SITE (30285): n equals a,t,g, or c
  SITE (30286): n equals a,t,g, or c
  SITE (30287): n equals a,t,g, or c
  SITE (30288): n equals a,t,g, or c
  SITE (30289): n equals a,t,g, or c
  SITE (30290): n equals a,t,g, or c
  SITE (30291): n equals a,t,g, or c
  SITE (30292): n equals a,t,g, or c
  SITE (30293): n equals a,t,g, or c
  SITE (30294): n equals a,t,g, or c
  SITE (30295): n equals a,t,g, or c
  SITE (30296): n equals a,t,g, or c
  SITE (30297): n equals a,t,g, or c
  SITE (30298): n equals a,t,g, or c
  SITE (30299): n equals a,t,g, or c
  SITE (30300): n equals a,t,g, or c
  SITE (30301): n equals a,t,g, or c
  SITE (30302): n equals a,t,g, or c
  SITE (30303): n equals a,t,g, or c
  SITE (30304): n equals a,t,g, or c
  SITE (30305): n equals a,t,g, or c
  SITE (30306): n equals a,t,g, or c
  SITE (30307): n equals a,t,g, or c
  SITE (30308): n equals a,t,g, or c
  SITE (30309): n equals a,t,g, or c
  SITE (30310): n equals a,t,g, or c
  SITE (30311): n equals a,t,g, or c
  SITE (30312): n equals a,t,g, or c
  SITE (30313): n equals a,t,g, or c
  SITE (30314): n equals a,t,g, or c
  SITE (30315): n equals a,t,g, or c
  SITE (30316): n equals a,t,g, or c
  SITE (30317): n equals a,t,g, or c
  SITE (30318): n equals a,t,g, or c
  SITE (30319): n equals a,t,g, or c
  SITE (30320): n equals a,t,g, or c
  SITE (30321): n equals a,t,g, or c
  SITE (30322): n equals a,t,g, or c
  SITE (30323): n equals a,t,g, or c
  SITE (30324): n equals a,t,g, or c
  SITE (30325): n equals a,t,g, or c
  SITE (30326): n equals a,t,g, or c
  SITE (30327): n equals a,t,g, or c
  SITE (30328): n equals a,t,g, or c
  SITE (30329): n equals a,t,g, or c
  SITE (30330): n equals a,t,g, or c
  SITE (30331): n equals a,t,g, or c
  SITE (30332): n equals a,t,g, or c
  SITE (30333): n equals a,t,g, or c
  SITE (30334): n equals a,t,g, or c
  SITE (30335): n equals a,t,g, or c
  SITE (30336): n equals a,t,g, or c
  SITE (30337): n equals a,t,g, or c
  SITE (30338): n equals a,t,g, or c
  SITE (30339): n equals a,t,g, or c
  SITE (30340): n equals a,t,g, or c
  SITE (30341): n equals a,t,g, or c
  SITE (30342): n equals a,t,g, or c
  SITE (30343): n equals a,t,g, or c
  SITE (30344): n equals a,t,g, or c
  SITE (30345): n equals a,t,g, or c
  SITE (30346): n equals a,t,g, or c
  SITE (30347): n equals a,t,g, or c
  SITE (30348): n equals a,t,g, or c
  SITE (30349): n equals a,t,g, or c
  SITE (30350): n equals a,t,g, or c
  SITE (30351): n equals a,t,g, or c
  SITE (30352): n equals a,t,g, or c
  SITE (30353): n equals a,t,g, or c
  SITE (30354): n equals a,t,g, or c
  SITE (30355): n equals a,t,g, or c
  SITE (30356): n equals a,t,g, or c
  SITE (30357): n equals a,t,g, or c
  SITE (30358): n equals a,t,g, or c
  SITE (30359): n equals a,t,g, or c
  SITE (30360): n equals a,t,g, or c
  SITE (30361): n equals a,t,g, or c
  SITE (30362): n equals a,t,g, or c
  SITE (30363): n equals a,t,g, or c
  SITE (30364): n equals a,t,g, or c
  SITE (30365): n equals a,t,g, or c
  SITE (30366): n equals a,t,g, or c
  SITE (30367): n equals a,t,g, or c
  SITE (30368): n equals a,t,g, or c
  SITE (30369): n equals a,t,g, or c
  SITE (30370): n equals a,t,g, or c
  SITE (30371): n equals a,t,g, or c
  SITE (30372): n equals a,t,g, or c
  SITE (30373): n equals a,t,g, or c
  SITE (30374): n equals a,t,g, or c
  SITE (30375): n equals a,t,g, or c
  SITE (30376): n equals a,t,g, or c
  SITE (30377): n equals a,t,g, or c
  SITE (30378): n equals a,t,g, or c
  SITE (30379): n equals a,t,g, or c
  SITE (30380): n equals a,t,g, or c
  SITE (30381): n equals a,t,g, or c
  SITE (30382): n equals a,t,g, or c
  SITE (30383): n equals a,t,g, or c
  SITE (30384): n equals a,t,g, or c
  SITE (30385): n equals a,t,g, or c
  SITE (30386): n equals a,t,g, or c
  SITE (30387): n equals a,t,g, or c
  SITE (30388): n equals a,t,g, or c
  SITE (30389): n equals a,t,g, or c
  SITE (30390): n equals a,t,g, or c
  SITE (30391): n equals a,t,g, or c
  SITE (30392): n equals a,t,g, or c
  SITE (30393): n equals a,t,g, or c
  SITE (30394): n equals a,t,g, or c
  SITE (30395): n equals a,t,g, or c
  SITE (30396): n equals a,t,g, or c
  SITE (30397): n equals a,t,g, or c
  SITE (30398): n equals a,t,g, or c
  SITE (30399): n equals a,t,g, or c
  SITE (30400): n equals a,t,g, or c
  SITE (30401): n equals a,t,g, or c
  SITE (30402): n equals a,t,g, or c
  SITE (30403): n equals a,t,g, or c
  SITE (30404): n equals a,t,g, or c
  SITE (30405): n equals a,t,g, or c
  SITE (30406): n equals a,t,g, or c
  SITE (30407): n equals a,t,g, or c
  SITE (30408): n equals a,t,g, or c
  SITE (30409): n equals a,t,g, or c
  SITE (30410): n equals a,t,g, or c
  SITE (30411): n equals a,t,g, or c
  SITE (30412): n equals a,t,g, or c
  SITE (30413): n equals a,t,g, or c
  SITE (30414): n equals a,t,g, or c
  SITE (30415): n equals a,t,g, or c
  SITE (30416): n equals a,t,g, or c
  SITE (30417): n equals a,t,g, or c
  SITE (30418): n equals a,t,g, or c
  SITE (30419): n equals a,t,g, or c
  SITE (30420): n equals a,t,g, or c
  SITE (30421): n equals a,t,g, or c
  SITE (30422): n equals a,t,g, or c
  SITE (30423): n equals a,t,g, or c
  SITE (30424): n equals a,t,g, or c
  SITE (30425): n equals a,t,g, or c
  SITE (30426): n equals a,t,g, or c
  SITE (30427): n equals a,t,g, or c
  SITE (30428): n equals a,t,g, or c
  SITE (30429): n equals a,t,g, or c
  SITE (30430): n equals a,t,g, or c
  SITE (30431): n equals a,t,g, or c
  SITE (30432): n equals a,t,g, or c
  SITE (30433): n equals a,t,g, or c
  SITE (30434): n equals a,t,g, or c
  SITE (30435): n equals a,t,g, or c
  SITE (30436): n equals a,t,g, or c
  SITE (30437): n equals a,t,g, or c
  SITE (30438): n equals a,t,g, or c
  SITE (30439): n equals a,t,g, or c
  SITE (30440): n equals a,t,g, or c
  SITE (30441): n equals a,t,g, or c
  SITE (30442): n equals a,t,g, or c
  SITE (30443): n equals a,t,g, or c
  SITE (30444): n equals a,t,g, or c
  SITE (30445): n equals a,t,g, or c
  SITE (30446): n equals a,t,g, or c
  SITE (30447): n equals a,t,g, or c
  SITE (30448): n equals a,t,g, or c
  SITE (30449): n equals a,t,g, or c
  SITE (30450): n equals a,t,g, or c
  SITE (30451): n equals a,t,g, or c
  SITE (30452): n equals a,t,g, or c
  SITE (30453): n equals a,t,g, or c
  SITE (30454): n equals a,t,g, or c
  SITE (30455): n equals a,t,g, or c
  SITE (30456): n equals a,t,g, or c
  SITE (30457): n equals a,t,g, or c
  SITE (30458): n equals a,t,g, or c
  SITE (30459): n equals a,t,g, or c
  SITE (30460): n equals a,t,g, or c
  SITE (30461): n equals a,t,g, or c
  SITE (30462): n equals a,t,g, or c
  SITE (30463): n equals a,t,g, or c
  SITE (30464): n equals a,t,g, or c
  SITE (30465): n equals a,t,g, or c
  SITE (30466): n equals a,t,g, or c
  SITE (30467): n equals a,t,g, or c
  SITE (30468): n equals a,t,g, or c
  SITE (30469): n equals a,t,g, or c
  SITE (30470): n equals a,t,g, or c
  SITE (30471): n equals a,t,g, or c
  SITE (30472): n equals a,t,g, or c
  SITE (30473): n equals a,t,g, or c
  SITE (30474): n equals a,t,g, or c
  SITE (30475): n equals a,t,g, or c
  SITE (30476): n equals a,t,g, or c
  SITE (30477): n equals a,t,g, or c
  SITE (30478): n equals a,t,g, or c
  SITE (30479): n equals a,t,g, or c
  SITE (30480): n equals a,t,g, or c
  SITE (30481): n equals a,t,g, or c
  SITE (30482): n equals a,t,g, or c
  SITE (30483): n equals a,t,g, or c
  SITE (30484): n equals a,t,g, or c
  SITE (30485): n equals a,t,g, or c
  SITE (30486): n equals a,t,g, or c
  SITE (30487): n equals a,t,g, or c
  SITE (30488): n equals a,t,g, or c
  SITE (30489): n equals a,t,g, or c
  SITE (30490): n equals a,t,g, or c
  SITE (30491): n equals a,t,g, or c
  SITE (30492): n equals a,t,g, or c
  SITE (30493): n equals a,t,g, or c
  SITE (30494): n equals a,t,g, or c
  SITE (30495): n equals a,t,g, or c
  SITE (30496): n equals a,t,g, or c
  SITE (30497): n equals a,t,g, or c
  SITE (30498): n equals a,t,g, or c
  SITE (30499): n equals a,t,g, or c
  SITE (30500): n equals a,t,g, or c
  SITE (30501): n equals a,t,g, or c
  SITE (30502): n equals a,t,g, or c
  SITE (30503): n equals a,t,g, or c
  SITE (30504): n equals a,t,g, or c
  SITE (30505): n equals a,t,g, or c
  SITE (30506): n equals a,t,g, or c
  SITE (30507): n equals a,t,g, or c
  SITE (30508): n equals a,t,g, or c
  SITE (30509): n equals a,t,g, or c
  SITE (30510): n equals a,t,g, or c
  SITE (30511): n equals a,t,g, or c
  SITE (30512): n equals a,t,g, or c
  SITE (30513): n equals a,t,g, or c
  SITE (30514): n equals a,t,g, or c
  SITE (30515): n equals a,t,g, or c
  SITE (30516): n equals a,t,g, or c
  SITE (30517): n equals a,t,g, or c
  SITE (30518): n equals a,t,g, or c
  SITE (30519): n equals a,t,g, or c
  SITE (30520): n equals a,t,g, or c
  SITE (30521): n equals a,t,g, or c
  SITE (30522): n equals a,t,g, or c
  SITE (30523): n equals a,t,g, or c
  SITE (30524): n equals a,t,g, or c
  SITE (30525): n equals a,t,g, or c
  SITE (30526): n equals a,t,g, or c
  SITE (30527): n equals a,t,g, or c
  SITE (30528): n equals a,t,g, or c
  SITE (30529): n equals a,t,g, or c
  SITE (30530): n equals a,t,g, or c
  SITE (30531): n equals a,t,g, or c
  SITE (30532): n equals a,t,g, or c
  SITE (30533): n equals a,t,g, or c
  SITE (30534): n equals a,t,g, or c
  SITE (30535): n equals a,t,g, or c
  SITE (30536): n equals a,t,g, or c
  SITE (30537): n equals a,t,g, or c
  SITE (30538): n equals a,t,g, or c
  SITE (30539): n equals a,t,g, or c
  SITE (30540): n equals a,t,g, or c
  SITE (30541): n equals a,t,g, or c
  SITE (30542): n equals a,t,g, or c
  SITE (30543): n equals a,t,g, or c
  SITE (30544): n equals a,t,g, or c
  SITE (30545): n equals a,t,g, or c
  SITE (30546): n equals a,t,g, or c
  SITE (30547): n equals a,t,g, or c
  SITE (30548): n equals a,t,g, or c
  SITE (30549): n equals a,t,g, or c
  SITE (30550): n equals a,t,g, or c
  SITE (30551): n equals a,t,g, or c
  SITE (30552): n equals a,t,g, or c
  SITE (30553): n equals a,t,g, or c
  SITE (30554): n equals a,t,g, or c
  SITE (30555): n equals a,t,g, or c
  SITE (30556): n equals a,t,g, or c
  SITE (30557): n equals a,t,g, or c
  SITE (30558): n equals a,t,g, or c
  SITE (30559): n equals a,t,g, or c
  SITE (30560): n equals a,t,g, or c
  SITE (30561): n equals a,t,g, or c
  SITE (30562): n equals a,t,g, or c
  SITE (30563): n equals a,t,g, or c
  SITE (30564): n equals a,t,g, or c
  SITE (30565): n equals a,t,g, or c
  SITE (30566): n equals a,t,g, or c
  SITE (30567): n equals a,t,g, or c
  SITE (30568): n equals a,t,g, or c
  SITE (30569): n equals a,t,g, or c
  SITE (30570): n equals a,t,g, or c
  SITE (30571): n equals a,t,g, or c
  SITE (30572): n equals a,t,g, or c
  SITE (30573): n equals a,t,g, or c
  SITE (30574): n equals a,t,g, or c
  SITE (30575): n equals a,t,g, or c
  SITE (30576): n equals a,t,g, or c
  SITE (30577): n equals a,t,g, or c
  SITE (30578): n equals a,t,g, or c
  SITE (30579): n equals a,t,g, or c
  SITE (30580): n equals a,t,g, or c
  SITE (30581): n equals a,t,g, or c
  SITE (30582): n equals a,t,g, or c
  SITE (30583): n equals a,t,g, or c
  SITE (30584): n equals a,t,g, or c
  SITE (30585): n equals a,t,g, or c
  SITE (30586): n equals a,t,g, or c
  SITE (30587): n equals a,t,g, or c
  SITE (30588): n equals a,t,g, or c
  SITE (30589): n equals a,t,g, or c
  SITE (30590): n equals a,t,g, or c
  SITE (30591): n equals a,t,g, or c
  SITE (30592): n equals a,t,g, or c
  SITE (30593): n equals a,t,g, or c
  SITE (30594): n equals a,t,g, or c
  SITE (30595): n equals a,t,g, or c
  SITE (30596): n equals a,t,g, or c
  SITE (30597): n equals a,t,g, or c
  SITE (30598): n equals a,t,g, or c
  SITE (30599): n equals a,t,g, or c
  SITE (30600): n equals a,t,g, or c
  SITE (30601): n equals a,t,g, or c
  SITE (30602): n equals a,t,g, or c
  SITE (30603): n equals a,t,g, or c
  SITE (30604): n equals a,t,g, or c
  SITE (30605): n equals a,t,g, or c
  SITE (30606): n equals a,t,g, or c
  SITE (30607): n equals a,t,g, or c
  SITE (30608): n equals a,t,g, or c
  SITE (30609): n equals a,t,g, or c
  SITE (30610): n equals a,t,g, or c
  SITE (30611): n equals a,t,g, or c
  SITE (30612): n equals a,t,g, or c
  SITE (30613): n equals a,t,g, or c
  SITE (30614): n equals a,t,g, or c
  SITE (30615): n equals a,t,g, or c
  SITE (30616): n equals a,t,g, or c
  SITE (30617): n equals a,t,g, or c
  SITE (30618): n equals a,t,g, or c
  SITE (30619): n equals a,t,g, or c
  SITE (30620): n equals a,t,g, or c
  SITE (30621): n equals a,t,g, or c
  SITE (30622): n equals a,t,g, or c
  SITE (30623): n equals a,t,g, or c
  SITE (30624): n equals a,t,g, or c
  SITE (30625): n equals a,t,g, or c
  SITE (30626): n equals a,t,g, or c
  SITE (30627): n equals a,t,g, or c
  SITE (30628): n equals a,t,g, or c
  SITE (30629): n equals a,t,g, or c
  SITE (30630): n equals a,t,g, or c
  SITE (30631): n equals a,t,g, or c
  SITE (30632): n equals a,t,g, or c
  SITE (30633): n equals a,t,g, or c
  SITE (30634): n equals a,t,g, or c
  SITE (30635): n equals a,t,g, or c
  SITE (30636): n equals a,t,g, or c
  SITE (30637): n equals a,t,g, or c
  SITE (30638): n equals a,t,g, or c
  SITE (30639): n equals a,t,g, or c
  SITE (30640): n equals a,t,g, or c
  SITE (30641): n equals a,t,g, or c
  SITE (30642): n equals a,t,g, or c
  SITE (30643): n equals a,t,g, or c
  SITE (30644): n equals a,t,g, or c
  SITE (30645): n equals a,t,g, or c
  SITE (30646): n equals a,t,g, or c
  SITE (30647): n equals a,t,g, or c
  SITE (30648): n equals a,t,g, or c
  SITE (30649): n equals a,t,g, or c
  SITE (30650): n equals a,t,g, or c
  SITE (30651): n equals a,t,g, or c
  SITE (30652): n equals a,t,g, or c
  SITE (30653): n equals a,t,g, or c
  SITE (30654): n equals a,t,g, or c
  SITE (30655): n equals a,t,g, or c
  SITE (30656): n equals a,t,g, or c
  SITE (30657): n equals a,t,g, or c
  SITE (30658): n equals a,t,g, or c
  SITE (30659): n equals a,t,g, or c
  SITE (30660): n equals a,t,g, or c
  SITE (30661): n equals a,t,g, or c
  SITE (30662): n equals a,t,g, or c
  SITE (30663): n equals a,t,g, or c
  SITE (30664): n equals a,t,g, or c
  SITE (30665): n equals a,t,g, or c
  SITE (30666): n equals a,t,g, or c
  SITE (30667): n equals a,t,g, or c
  SITE (30668): n equals a,t,g, or c
  SITE (30669): n equals a,t,g, or c
  SITE (30670): n equals a,t,g, or c
  SITE (30671): n equals a,t,g, or c
  SITE (30672): n equals a,t,g, or c
  SITE (30673): n equals a,t,g, or c
  SITE (30674): n equals a,t,g, or c
  SITE (30675): n equals a,t,g, or c
  SITE (30676): n equals a,t,g, or c
  SITE (30677): n equals a,t,g, or c
  SITE (30678): n equals a,t,g, or c
  SITE (30679): n equals a,t,g, or c
  SITE (30680): n equals a,t,g, or c
  SITE (30681): n equals a,t,g, or c
  SITE (30682): n equals a,t,g, or c
  SITE (30683): n equals a,t,g, or c
  SITE (30684): n equals a,t,g, or c
  SITE (30685): n equals a,t,g, or c
  SITE (30686): n equals a,t,g, or c
  SITE (30687): n equals a,t,g, or c
  SITE (30688): n equals a,t,g, or c
  SITE (30689): n equals a,t,g, or c
  SITE (30690): n equals a,t,g, or c
  SITE (30691): n equals a,t,g, or c
  SITE (30692): n equals a,t,g, or c
  SITE (30693): n equals a,t,g, or c
  SITE (30694): n equals a,t,g, or c
  SITE (30695): n equals a,t,g, or c
  SITE (30696): n equals a,t,g, or c
  SITE (30697): n equals a,t,g, or c
  SITE (30698): n equals a,t,g, or c
  SITE (30699): n equals a,t,g, or c
  SITE (30700): n equals a,t,g, or c
  SITE (30701): n equals a,t,g, or c
  SITE (30702): n equals a,t,g, or c
  SITE (30703): n equals a,t,g, or c
  SITE (30704): n equals a,t,g, or c
  SITE (30705): n equals a,t,g, or c
  SITE (30706): n equals a,t,g, or c
  SITE (30707): n equals a,t,g, or c
  SITE (30708): n equals a,t,g, or c
  SITE (30709): n equals a,t,g, or c
  SITE (30710): n equals a,t,g, or c
  SITE (30711): n equals a,t,g, or c
  SITE (30712): n equals a,t,g, or c
  SITE (30713): n equals a,t,g, or c
  SITE (30714): n equals a,t,g, or c
  SITE (30715): n equals a,t,g, or c
  SITE (30716): n equals a,t,g, or c
  SITE (30717): n equals a,t,g, or c
  SITE (30718): n equals a,t,g, or c
  SITE (30719): n equals a,t,g, or c
  SITE (30720): n equals a,t,g, or c
  SITE (30721): n equals a,t,g, or c
  SITE (30722): n equals a,t,g, or c
  SITE (30723): n equals a,t,g, or c
  SITE (30724): n equals a,t,g, or c
  SITE (30725): n equals a,t,g, or c
  SITE (30726): n equals a,t,g, or c
  SITE (30727): n equals a,t,g, or c
  SITE (30728): n equals a,t,g, or c
  SITE (30729): n equals a,t,g, or c
  SITE (30730): n equals a,t,g, or c
  SITE (30731): n equals a,t,g, or c
  SITE (30732): n equals a,t,g, or c
  SITE (30733): n equals a,t,g, or c
  SITE (30734): n equals a,t,g, or c
  SITE (30735): n equals a,t,g, or c
  SITE (30736): n equals a,t,g, or c
  SITE (30737): n equals a,t,g, or c
  SITE (30738): n equals a,t,g, or c
  SITE (30739): n equals a,t,g, or c
  SITE (30740): n equals a,t,g, or c
  SITE (30741): n equals a,t,g, or c
  SITE (30742): n equals a,t,g, or c
  SITE (30743): n equals a,t,g, or c
  SITE (30744): n equals a,t,g, or c
  SITE (30745): n equals a,t,g, or c
  SITE (30746): n equals a,t,g, or c
  SITE (30747): n equals a,t,g, or c
  SITE (30748): n equals a,t,g, or c
  SITE (30749): n equals a,t,g, or c
  SITE (30750): n equals a,t,g, or c
  SITE (30751): n equals a,t,g, or c
  SITE (30752): n equals a,t,g, or c
  SITE (30753): n equals a,t,g, or c
  SITE (30754): n equals a,t,g, or c
  SITE (30755): n equals a,t,g, or c
  SITE (30756): n equals a,t,g, or c
  SITE (30757): n equals a,t,g, or c
  SITE (30758): n equals a,t,g, or c
  SITE (30759): n equals a,t,g, or c
  SITE (30760): n equals a,t,g, or c
  SITE (30761): n equals a,t,g, or c
  SITE (30762): n equals a,t,g, or c
  SITE (30763): n equals a,t,g, or c
  SITE (30764): n equals a,t,g, or c
  SITE (30765): n equals a,t,g, or c
  SITE (30766): n equals a,t,g, or c
  SITE (30767): n equals a,t,g, or c
  SITE (30768): n equals a,t,g, or c
  SITE (30769): n equals a,t,g, or c
  SITE (30770): n equals a,t,g, or c
  SITE (30771): n equals a,t,g, or c
  SITE (30772): n equals a,t,g, or c
  SITE (30773): n equals a,t,g, or c
  SITE (30774): n equals a,t,g, or c
  SITE (30775): n equals a,t,g, or c
  SITE (30776): n equals a,t,g, or c
  SITE (30777): n equals a,t,g, or c
  SITE (30778): n equals a,t,g, or c
  SITE (30779): n equals a,t,g, or c
  SITE (30780): n equals a,t,g, or c
  SITE (30781): n equals a,t,g, or c
  SITE (30782): n equals a,t,g, or c
  SITE (30783): n equals a,t,g, or c
  SITE (30784): n equals a,t,g, or c
  SITE (30785): n equals a,t,g, or c
  SITE (30786): n equals a,t,g, or c
  SITE (30787): n equals a,t,g, or c
  SITE (30788): n equals a,t,g, or c
  SITE (30789): n equals a,t,g, or c
  SITE (30790): n equals a,t,g, or c
  SITE (30791): n equals a,t,g, or c
  SITE (30792): n equals a,t,g, or c
  SITE (30793): n equals a,t,g, or c
  SITE (30794): n equals a,t,g, or c
  SITE (30795): n equals a,t,g, or c
  SITE (30796): n equals a,t,g, or c
  SITE (30797): n equals a,t,g, or c
  SITE (30798): n equals a,t,g, or c
  SITE (30799): n equals a,t,g, or c
  SITE (30800): n equals a,t,g, or c
  SITE (30801): n equals a,t,g, or c
  SITE (30802): n equals a,t,g, or c
  SITE (30803): n equals a,t,g, or c
  SITE (30804): n equals a,t,g, or c
  SITE (30805): n equals a,t,g, or c
  SITE (30806): n equals a,t,g, or c
  SITE (30807): n equals a,t,g, or c
  SITE (30808): n equals a,t,g, or c
  SITE (30809): n equals a,t,g, or c
  SITE (30810): n equals a,t,g, or c
  SITE (30811): n equals a,t,g, or c
  SITE (30812): n equals a,t,g, or c
  SITE (30813): n equals a,t,g, or c
  SITE (30814): n equals a,t,g, or c
  SITE (30815): n equals a,t,g, or c
  SITE (30816): n equals a,t,g, or c
  SITE (30817): n equals a,t,g, or c
  SITE (30818): n equals a,t,g, or c
  SITE (30819): n equals a,t,g, or c
  SITE (30820): n equals a,t,g, or c
  SITE (30821): n equals a,t,g, or c
  SITE (30822): n equals a,t,g, or c
  SITE (30823): n equals a,t,g, or c
  SITE (30824): n equals a,t,g, or c
  SITE (30825): n equals a,t,g, or c
  SITE (30826): n equals a,t,g, or c
  SITE (30827): n equals a,t,g, or c
  SITE (30828): n equals a,t,g, or c
  SITE (30829): n equals a,t,g, or c
  SITE (30830): n equals a,t,g, or c
  SITE (30831): n equals a,t,g, or c
  SITE (30832): n equals a,t,g, or c
  SITE (30833): n equals a,t,g, or c
  SITE (30834): n equals a,t,g, or c
  SITE (30835): n equals a,t,g, or c
  SITE (30836): n equals a,t,g, or c
  SITE (30837): n equals a,t,g, or c
  SITE (30838): n equals a,t,g, or c
  SITE (30839): n equals a,t,g, or c
  SITE (30840): n equals a,t,g, or c
  SITE (30841): n equals a,t,g, or c
  SITE (30842): n equals a,t,g, or c
  SITE (30843): n equals a,t,g, or c
  SITE (30844): n equals a,t,g, or c
  SITE (30845): n equals a,t,g, or c
  SITE (30846): n equals a,t,g, or c
  SITE (30847): n equals a,t,g, or c
  SITE (30848): n equals a,t,g, or c
  SITE (30849): n equals a,t,g, or c
  SITE (30850): n equals a,t,g, or c
  SITE (30851): n equals a,t,g, or c
  SITE (30852): n equals a,t,g, or c
  SITE (30853): n equals a,t,g, or c
  SITE (30854): n equals a,t,g, or c
  SITE (30855): n equals a,t,g, or c
  SITE (30856): n equals a,t,g, or c
  SITE (30857): n equals a,t,g, or c
  SITE (30858): n equals a,t,g, or c
  SITE (30859): n equals a,t,g, or c
  SITE (30860): n equals a,t,g, or c
  SITE (30861): n equals a,t,g, or c
  SITE (30862): n equals a,t,g, or c
  SITE (30863): n equals a,t,g, or c
  SITE (30864): n equals a,t,g, or c
  SITE (30865): n equals a,t,g, or c
  SITE (30866): n equals a,t,g, or c
  SITE (30867): n equals a,t,g, or c
  SITE (30868): n equals a,t,g, or c
  SITE (30869): n equals a,t,g, or c
  SITE (30870): n equals a,t,g, or c
  SITE (30871): n equals a,t,g, or c
  SITE (30872): n equals a,t,g, or c
  SITE (30873): n equals a,t,g, or c
  SITE (30874): n equals a,t,g, or c
  SITE (30875): n equals a,t,g, or c
  SITE (30876): n equals a,t,g, or c
  SITE (30877): n equals a,t,g, or c
  SITE (30878): n equals a,t,g, or c
  SITE (30879): n equals a,t,g, or c
  SITE (30880): n equals a,t,g, or c
gaaggaaatttgtgattagaagccgcgctgttcttatttaagagcgttagcgcaacttccggtattgttgcaagatggccgcgcccagtgatggattcaagcctcgtgaacgaagcggtggggagcaggcacaggactgggatgctctgccacccaagcggccccgactaggggcaggaaacaagatcggaggccgtaggcttattgtggtgctggaaggggccagtctggagacagtcaaggtagtttgggacaggaagtggagaagtagtaaatcgataggttgggactccgtggaatgagggtaaggggcccagagtggatgtagaaagcagagaggggtgaaagatgcttttgaaggaaggtggcttggttggctttgcgttgatttgacatcctgggatggtagtactcatttttctttctttttttttttttttttgagacggagtctcgctctgtcgcccaggctggagtgcagttgcgcgacctcggctcactgcaacttctgcctcccgccttcaaacagttctcctgactcagcctctggagtagctgggactacaggcaggtgccaccacgcccggctaatttttttgtatttttagttcagatggggtttcaccatgttggccacgctggtctcgaactcctgacctcaagtgatccgcccgcctcggcctcccaaagtgttgggattagaggcgtgagccactgtgcccggccggtagtactcattttcttttgctctttttgaatgatattctagccctcacctccttgcttccaattggtttaccaggattctgtggtatagtagtctaagcagaggaaagtttcgttccttgcgtcattccacatcccaagacaagttactgggcagatgagaaacgtagttatgtagcctagtctgcccacactttttgtaagggcttcgtgtttcaattcattagtatccatagtcacctctctctaatatccacctatgatacactgtccagacctggttattatttaaaacttttacatctgcatttttatctatcattcatctctttccccacatgtaatagaaccagcagttctctatcttaaagccttgggcagtgttcttcctcctcctttctcttacccgttagaactaattgaataggcccagaagaaatcgcattggtttagaagtcaggccaggattttaatcttcgttctaaatacacttttttttttttttttttttgagatggagtctcagtctctaccaggctggagtgcagtggcacgatcttggctcactgcagcctccgcctcccgggttcaatcgattctcctgcctcagcctccagagtagctgggattacaggcctgcgcctgtaatctattaaaagaatagaaaacatgattatatcctactaatgggttgaaactgtattattcattcaagaaggtttttttcttctataactaagggtgtctcatggacttagttcttggtcatttgttctttgtgctctctgtgacattacttcaactattcaatttcaaaatctacatcccttttttcgcagactttttggagccatatatctcaagaatgttgctagacatatacattccagtgatacataaaaacttaaccttccaaaacttgtatttgtatataacagtttgtttttagactttttactgaccaccctaatgctccttgggactccaaattgcaacttggaattatttcttttagctgctacagatgtagtccacttctttaacatcaaacttctgatgtcttttccagtgtacagagagttgttaggatagtgtctgtcagtcattcccatcctgccctgcttactccagaattatttttggctttgtgcttgatacattaggattctgtggtttacaaagcagcttcatatataatcactgccctttagtgtctcagctcccaattttcctcaaaatttcctttcttcgtttccactttttcttttttgtttcttttttgagatagggtcttgctctgttgcctgggcaacagagtgcagtggtgtgatggttcactgcagcctctacttccctggctcaagcagtcctcccacctcatcctcctgagtaactgggactgccagcaaatggcactgcgcctggctaatttttttttttttttttgtgagacagggtcccaccgtgttgcccaggccggtctcaaattcctgggctcaagtgatccttccacctcggcctcctaaagtgttgggatcacaggcataagccaccacacctggctactttgtcttgattccatctgtacctttgctcatgccagtctttcttttttcttttttttgagacagggtcttgctggagtgcagtggtacagtcttggctcactgcaatctctgtctcctgggctcaagccatcctcccaccttagcctcccaagtagctaggactacaggcatgtgccaccatgcccagctaatttttgtatttttagtagagatggggtttcgccatgttgcccaggctggtcttgaactcctgaccttaagtgatttgcctgccttggcctcccagagtgctgggattacagccgtgagccactgcatctgcccccatgcccgtcttaaaactgggaataacccctcttccttttacttctgagagttttctttgattaaactgcctcctgcatcattagttttcacatttcttttttttgagatggagtctcgctctgttgcccgggctggagtgcagtggcgctgcaagctccgcctcctgggttcatgccattctcctgcctctgcctcccaagtagctgggactacaggcgcctgccaccatgcccggctaattttttatatttttagtagagatggggtttcaccgtgttagccacgatggtctcaatctcctgaccttgtgatctgcccgcctcggcctcccaaagtgctgggattacaggcgtgagccaccacgcccggccttcacatttcttgttcagatttgcagctcttcacttagtgcatgtttggtgtacgcaaactgagggtggtgactcgatattttgcacagtacctacttactgctcctgtaataaacacagcattcagccttgctaactactaactcctgcctagttccaggatgtctcattggccttgcctaacagccacaggttttttaattaaatccagtgtattagtagataatgtgaagtcacaggttgtgcccttcctcctgtttccctctcagaccattcactggggagtgcaaataaggctgcacagtaatcccccgaagggcttgctgggctccacccccagtgttcctggtttagtaggtctagggtgggcctgagaatttgcctaacaagtttccaggtgcagctgctgctggtagtttggggaccacacttgaagaaccacggggctaggtaacagaagcttatgctgttctctcgtcatgttccctgttcttcaggtagggaagacatatgagctactcaactgtgacaagcacaagtctatattgttgaagaatggacgggaccctggggaagcgcggccagatatcacccaccaggtaactccagggacagtgctcacaaccctttgagcctctgtatggaagggttggcagctgagtgctgcctctcttcagccttaaccatgtctcggtttctgctttgctcagagtttgctgatgctgatggatagtcccctgaaccgagctggcttgctacaggtttatatccatacacagaagaatgttctgattgaagtgaatccccagacccgaattcccagaacctttgaccgcttttgtggcctcatgggtaagaagccttagaacaaagttagaatgaacttgtcagtagggaagaagggaggaagaggaaaagggagaactaaatgtggatttttaagcgagaaaatgggagaacaacatgattaataccaggacaaggactgttattatttttctatgtttgtggaaactccactcctgttcttgcagtagcttcctggctgagtgaaagagggagtctgaacccatcactgtacagctagccatatgcttggcaactgtttgttcctaacatttcaggagtccagtctagatataaagcacacagggaactcatcttatccatggggttttccttgttcgatgactggacagaaggactgtggtctccatctagctctgaactcttttttcccccttctagttcaacttttacacaagctcagtgttcgagcagctgatggcccccagaagcttttgaaggtgaggtattgaaacctgttagttgaaggctggttctgggaatgtttctggggctgacttttctctcttttttactttaggtaattaagaatccagtatcagatcactttccagttggatgtatgaaagttggcacttctttttccatcccggttgtcagtgatgtgcgtgagctggtgcccagcagtgatcctattgtttttgtggtaggggcctttgcccatggcaaggtaaggtctgggctcaaccctgaaattcttggtagagctgaacttagtatagaattcccagagcagtaggcattttaacaatgcttacaatgagctagaagacacatgacagttccacaccctgccccagggcacatcctttgagggctgctgccataattggaagtcacagttaggaccttcttcatcctttgtagggatttgatattcaacagcacagctgaaatactagctcagccatagttttcctgccctaaagaagggctgaaacagctactgagtgacagagttggctgacaaaactgttcttttcttaggtcagtgtggagtatacagagaagatggtgtccatcagtaactaccccctttctgctgccctcacctgtgcaaaacttaccacagcctttgaggaagtatggggggtcatttgacagtagtagaacctgttctgaaaccagaaactgttgatgtcacatcctttgaccctggtctgagctgactgctggaagatgatctttctgcactgagactgtggagtttggggaagccaaggctgtacatttgctatttgtttatcctatgaatactgttcttgcaaacctggttgttttggggttcctaaagtatccagtggtgtaaaactgtttgttccccgggacttcagggacagataggaggttacagagtttgcagtttggttccatgctttgaaggcaggctttagctcccagattcccatgtgctaaaggagagaaccctgatgatggagaagaactgtgaaagagagcagtcaggaatgctagtggtgaaaaactgaacaaacagaagtgattttatctaatacagttccaaggtagaaaaagtggagcaggcagggccttgcacccctctccacccccccatggggggggtggtggtagcggcacatacacaatcatagtaaattggcagaagaaaaacacaatagattcctggctagatggggagagataaggcaatgtgcatgggggaatcagaggggagatgtgagcccctctgctcctcccacaagagtttcccctttgggccgggcacggtggctcacgcctgtaatcccagcactttgggaggcggaggcgggtggatcacttgcggtcaggagttcgagaccagcctggccaacgtggtgaaatcccgtttctactgaaaatacaaaaattagctgggcatggtggcgtgcctgtattcccagctacttgggaggctgaggcaggaaaatcacttgaacccaggaggtggaggttgcggtgagctgagatcccgccactgcattccagcgtgggtgacaaagcaagacgccttctccaaaaaaaagtttcccctttggccccaaatgaagacttggctggcagcagaggcacagctggaagcatcgatcttccacctccctggcttttccattctctgctctggggcaaaggagtgctgtgaaaagggagacgagtagtttctgcaccagtcccgcacaggccacctgcaagacaagaggagtttggaaggctggttagttactcctgtaattcctggtctatagcccttccagatgtttcctagcatgcctcaataagtcacagtagtcattgcccatactgtgttccttagtagccaggctaatccttggaattcaccccagatttctaatactattgtttttttccagtctgttgctctattctgtaacctggtggtagttttagtttagctgtattaacttaccagggaaatggattattccatcttctttaacttctctttccttggcaccattgctttgtgaatataaggcaatatgaatagtaggctcaggaagaagatgtggccaaggaaatagatggatttatacacctgtggagagagaggccactaaggtagacaggcctggagtgtcctttgcaacctttgaggttgcagtgagtccctcccagtctcacaagcaggccttcacttgccttaagccatttgtcccacgtgaagaggcagaaggcagtcatggagtaacccatgaagagccagtggatggtctgttgcaccaaatagtagaagggctggaggacagtaatggcggccagcttgctcagggtggggctctcttgaatgagcctggcagcctggggagggaggaggagctcatcagcatcttgtcccttatattccccttcacccccaccctggaggcctacctgtctttccacaataacaatgaggaattccatctggaagcagaccaggtatcctgagtgcaggccgtgccagagggccaggaatagcaacgagagaccctgagagagttctttatttccaaggaacttgagtcgtttgaagatgtagctggagaaaagggtgggtggggcgaccctcaaactgactggtccttgcatcccgccacctgcctctgggtcctcaccctgaggattggattggagtgctggtgggttcccacgtgtagcccccagagggtacaggaggcagtgctgactgattacttttagagatggaaagcagacccaaggcggagctggagaccgtgtgcgcacgagccacttggttcagcagcagtgactgaggctgatgctgagatcagtggtgaaccagacactctactcaagctgcccacactctagtggtggggacaaacaagtaaagctgttgataaacagggcagtggaggacataagtccattggcagagctggagtaacacccaggtcttaacgcacttttatatcttgcctttttttcaaatatgacagtaatggtttttttgggaggggggtataggtgggggtcaaagtcagtgtgagcgacagggggttctgcccagatgggaaagacgcataggggtgacatggtacacccctgccctccaatctgggaagacagtggaaggaaggaaccagggtccaggctccccaccagcagctcaccgggccacccaggcgttggtgttgatgttgaatgaggcaatggtgccagtgaagcgggggtttgtttcaaagagccacaccttcatgttggcacaggcatcccactttgccttgcccttttcttcaaagccattgaagcccaggcccgtcaaaatgcatactccttcctgagagggaatagctcagttagggctcttgccactccccatactggcccccatggcttgtctaaataggaccttgtttcaacttttctacttactgtgaccagccaacaggtgacatatttgtacagcacaaacttgccccagatcagcatgtacatgcagcggaaccagaaggggtggttcttgagggaagaaagcacagtgcattagggatatcacatgactaggcagtttctctcagcactcttccttttcacacttgtggctggctacttcatacctgcctgagtcctgctgccagatgccctcaatagtctggcctgattgccttcacaataggcagagaggaataagcagagggcctggagaatattcattcgcctttcccttggagagcctcaagggcagcactgtatttaacttctctactgtttgccttcgttggcaaagtgtttggaatgagcatttggaatgttaagtacagaggggcccatattggattttaatttaaggagagaaacctgcccagaattactgaactgttttcaagcctttcagctgggcaggagcaaaagccagcacttccccccttcccttggtttctgaattccctagaagtgcccaaatgtatcagtcaagagaagaaaataggatggagaatcagaagctgctgtgctctgaggggtcacgtggatgtgataaggcaagctaggagcggctcctagagaaggcaacgggtgctaaatgtgcacctggcacagccctgtgcccgcgaaggttgttcagtgctggctgatgaacatgtcccagcacggctggcattgacaactcacagatctagagcaaaaccaacatgcacttgtagatgatatttcctacttctctgctatctgtagggatccttgcctgtccattttctagctctggtgcagtcatgctgctgctgctttagtagacactcacgtcatagtcttcagtgaggagatagtcttctgtgatgtgggggctgagcagtgtgtagcccactaggtagaaaaggcccagactcaggcgcttgagagcaggaatgatgctggaaaggaacgagtgaagttcctggtcacagagagcagagactattcccttcaccctctgaccttcagttatggagaggagtgtttaggggtgtggttgtctacctggaatgggatgagaagctctgctgcccaaagtgtttcctgtttcagggaaagatttctatggctggctatgaggaatggggactgcaaacctcttaagagttgtaggaaagtcagggcagcagacagtggaccagtcttgtgtttacccctcagggatgctactgatctcaaggtcttgccaggtctcacaatctccattgggactgaaaacccagtggaggtaagataataaaaataaccactttgaatctgctccttcatttcttggttgaattgatgctgaaacacaggatggacaagttctcagtgaaggaattcttctggcaattaaactttttttttttttttttttttaccattttaatttttattttctagagtcagggccttgctctgccactccggctagagtacagaggcatagtcattgctcgctgtggccttgaactcctgggctcaagcgatccccttgccttggccacctgagtagctgggactataggcatgtaccaccttgcctggataatttttttttgtagagatggggtctcactatgttgcccaggctggtcttgaactcctggcctccagtgatcctcctgccttggcctcccagagcgttggcattacaggcatgagccactgtgccctcctgcatttcctactgataaatatttttgagacaggattttgctatgttgcccagaatggagtgcagtggtgtgatcaaagctcactgcagccttgacccacctcccctggactcaagcaattctcccacttcagcctcctatgtagcttggactacagatgcatgccactatgtctgataatttttgtatttttttgtagagacagagtctctctatgttgccaggctggtctagaactcacgggctcaagtgatcctcccacctcggcctcccaaagtgctgggattatagaggtgaaaccactgtgcccagcctctatctacctacctacctatcaacctgcctacctacctatcaatcataaatatatttcatatatacatgaaaataggctttaaaggcagaaatgtgactggttcaggcaaaatcctgtggcataaatgtggatttttatgtttgtactagtgttagaatggataactggaagaaccctaaactaaaaagggcccactcctggcacagagtgcctgttacaacagtccagggcctgcatgactcaggtctctatgccagggtcatgctggagaatgcagctttcagaagagtcacttcagagtgagtgaaatacctacacaaacatctggaccaagaggggcaattacctgtttggtatctttcctggtatgtcaatcagctctccctgcaccagcttcatgtagtgattcattgagaactggggccctaccaagaaggccccatagaagtaggagaaaccagcaacttccagcagggaaggaacaccacgtatggcatatttctgttgctcagaggacaaggaattctatgccaagaagagaatgcatggttcaggatagccttgaatctccccacaagagccactttgagtgttccccacctgtgtgccccactgactggggttcttcaaatagccttctctttgggggatgacaaatagttgcttcttgtggaaatgcgtatgtgtgtgcatagctggctgttgctgctttagcaaatgccttgctggcattgatctctggactttgtgcaagagctggatcctgggcaaattagatttgttgatccttgctcagtgctatctgaaagggagattgcacaggctggggaatgagggagaggctccgctctggaatttgggttcagtcttttgttaacaacttttttcttccctttcattaagtcttgaacctctctgccgatgaatgggtacttacctgatctttccctccgtcaaagtagtcaacagccaaacctgagcagagagagaacggatgggtagggtggtgggagaggacactgaggatgtggcctgtagactgagtgcagccagaagtgtatggcggggggcggagggggggtgccgaggaagtttttagtgagatgggggagggacctacatgtaaggaaggcaggcagtgaccatcactcaccaatcagcttcaaagtcagaacacaatgtggcattgtccacttgatatcgtagttgccggtggcagtgtaatagtatccagccagaaggtaggcctaggagaggcagaagtatttattctagcatcactactatttcttctccttgctctgaaattcaatgttctctttcctttttcctttctcctcatcccatcattaaaagccttaataaattcctacaaatggaggtgctgaaaacctgtaatgggaagagcgttgctcaaggcttcttggcaaaatgagggctaaactgagatgagaatttagatgctgggaccacaggtgcatgccaccccacccggctaatttttaattttttttgtttcaccatgttgcccaggctggagggctaatttttgtattttttttgtagagatggggtttcaccatgttgcccgggttagtctcaaactcctgggctcaagcaatctgactgccttggcctcccaaggtgctgggattacaggtgtgagccactttgcctggcctaggcttaggttctttaactcattctaagttgcttttctgtcttgccttgaagtgactctgctcctggatagtgggttaaaccaaagagcctaatggcacagtatgcaaagggttagctggtggcccttccttgaggcaggcaaagagttaccattacaatctgtggatggaacacttgggcctgtgataagccacctacctgaagtcatactgctaagtgctgggagaggggttagaaattaggtctgctaatttctataccacagtcccctgcctacccctgtcccctgaaccgctgtcagctgtagcctgagctgctaagggaaagacgtttaccatctggaagcaaaaggtagtgaggacggcagtgatggtgcggcccattagtcgaaggatgaggaactgaagcacaatacacagcagggagtggtagagctggtttcctggatgcaagaagagagaatttagcctggtttttacactcccaccgtcctgagacttccaatcacaacgtaatatataaagaaaaaatgttggcatcaggatcttttttttcagaataacctcatgttttggaggagaggatggaaattatttattaaaataaaaaagattattagggtgttattttatttcttttctttttttgtttgtttttttagagatgcgacttgctctgttgtccagacttgagtgcagtagctcaatcatagctcactgcagccttgaattccgggctaccacacccagcttgttactgtatttttgaatgtctgaagtgaagaatgaatctaagtggggactgcttggctcggtcattcagttacatccacagcacagagaaactgaggattctttgttgatgaggtatggcaagggtaaccaccctcaaaatgtttttatctgacagaagaatgtacataaaagaaaaaaaggaaaagttaagctgtgttcctcttcatacaaccctctttgcaagtgggagcattataacttccctacctattagattctctcaaggaaattttgttcaagtctgttccttccaggttcccactaattgcggtgtcactgctaatttagtttactcaccaaagttaaaataagcaattgagaggcctgtaaaggtatggaagaggtggatgaggtaggtctccttgtagaaaaggtaatgccgataaaacaaagcaaaggggtaacctagatgggggaaaagataagaagagtgttatttgtgcctggtgccatcccagtttggtttggaagtttatctggcatgaaacgcagcccagagggagagagaaaaaaaaaacaacatacattatatggatggcaacagagaaggcaataacggtatccccaagaaccaaaagttttttgtaaatacaaattttgaactaaagatattaatatttgattgaggcaatataaagctgggtcctaagactaggtttcatttatagcttatgaactattgccagacattttctcttacttgaattttaaaaaatgatacaaggaagctaggcatggtggctcccatgtataatcccagcactctgggaggctgaggcaaggggattgcttgagccgaggagttcgacaccagcctgagcaacatagcgaaaccccgtctctattaaaaaacaagatacaaagatttgagcgtacccatctatgctccagaaacactcatttacactttgtgatctatcttgctagcactgtattatcagattatgaggaaaaatataaattaatatcaggctaaatactggaattgctgactgcatatatagcagttacaagttatgtggagatactcctcacagtctgtaatctgggcatcaaccaagttataaaatccatttaagtatactaaaaaaatgtcttctaaagccatgattcagagtatagtccaaaggccatgagtgaaccacagaggatcttctgatgggtcatgaactgattatacatggccaagggttgcttattgaattaaaaacggtcaataaaatttggtattcctaaactaaaattagcacattccatggctttactgcagactcaccttcagtgttctatctagaggtctggcggccatgcctggcaacatccccactgcactagtgcatatgtggaggatggggatctctcaactgctttttggaaagacattctgcctattctttcattgattattctcttgagttggtcatggtttatactttctgcaattcttgcttttatttttatttattttgagacagggtctcttgctctgtcacccaggctggagtgcagtggcacgatcatcgctcactgcagccttgacctcctgggctcaagtgatcctccaacttcagcctcttgagtagctgggaccacaggtgcttgccaccatgcctggctattttgtaatttttgtggacatgagttctcactatgttgcccaggctggccttgacctcctgggctcaaggaatcttcctgccttggcctcccaaagtgttgggattacaggcgtgagtcactgtgcctgatgaattgctgcgattcttgcttttaaattatgtaactgcagtttttatcatgggcaatacagtttactgtgagtttgcttaactctaaaacgcttagaatagtatcatacagaaataaattgctcaattatttgttaaataagtaaatgcacacaatcatgttatatgttggtttctgtccttctagtcatttttcccccatacattaaaaaaaaaaaaaaaaaaaaggctgggcgcggtggctcatgcctgtaatcccagcactatgggaggctgagacgggcggatcatgaggacaggagatcgagactatcctggctaacacggtgaaaccccgtctctactaaaaatacaaaaaaaaaaattagccgggtgtggtggcgggcgcctatagtcccagctactagggaggctgaggcaggagaatggcatgaacacgggaggcggagcttgcagtgagctgagatggcaccactgcactccagcctgggcgacagagcgagattccgtctcaaaaaaccaaaataaaacaaaacaaaaaactgtactggctggtgcagtggctcacgcctgtaaaccaaggcactttgggaggctgaggtgggtggatcacttgagatccggagtttgagaccatactggccaacatggtgaaaccccatctctaccaaaaatataaaaaattagctgggtgtggtggcgggtgcctgtaatcccagctactcgggaggctgaggcaggagaatcacttgaacctgggaggcagagtttgcagtgagctgagatcgtgccattgcactccagcttgggcaacagagcgagactctgtctcaaaacaaacaaacaaacaaatgccatttgatcttcctggtgccaggatcaactggtgtttttttttttttttgagatggagtttagctgtttttacccaggctggagagtgcaatggcacgatcttggcagctcactgcaacctccggcccctaggttcaagcgattctcctgcttcagcctcccaagtagctgggattacaggtgcccgccaccatgcccagtgaatttttgtatttttagtagagacggtatttcaccatgttggccaggctggtctcgaactcctgacctcaggtgatccacctgccttggcctcccaaagtgctaggattacaggcgtgagccaccacgcccggccaactggtgtttttttttttaattgctgttcccataataggctaggctcttaaatttatagcttcatgcaagtatagttgacccttgatcaacacaattttgaacagcaagggtccccttagacttccctctgcctctgccactgctgagatggcaaccctttctctttctcctcctccttgcctgctcaacctgaagatcatgaggaggaagacctttatgctgatccacttccactgaatgaagagtaaacatattttttcttgcttatgattctcttaataacattttcttttctatagtttactttatggtaagaaatacatatataacacaaatgacatacaaaatatatgttaatcaacttgtttatgctattggtaagtcttctattagtagttaagtttttggagagtcaaaagttatatgtggccgggtgtggtggctcatgcctgtaatctcagcactttgggaggctgaagcaggtggatcacgaggtcaggaaatcgagaccatcctggctaacatggtgaaattccgtctctactaaaatacaaaaaattagctgggcatggtggcacacacctgtagtcccagctactcaggaggctgaggcaggggaatcgcttgaacctgggaggcagaggttgcagtgagcagagattgcagtgagcagagagagccactgcactccagcctggtgacagagtgagactctgtctcaaaaaaaaaaaaaaaaaaaaaaaaagttacacctgtcggccgggtgcggcagctcacacctgtaatcccctactttgggaggcttaggcgggtgggtcgcctgagatcaggagtttgagacgagcctggccaacatggtgaaaccccatctctactaaaaatacaaaaattagttaggcgtggtgcaggcacctgtaatcccacctacttgggaagctgaggcaggagaattgcttgaacccaggaggcggaggtggcagtgagctgagatcacgccattgcactccagcttgggcaacgagcaagattctgtctcaaaaaaaaaagaaaaaaaagttttatgaggatttttgactgtacaaggggtgggatcccataggacctgcgctgttcaaggctcaactgtaattaattctacagatatcttatggattactggctcatgtattcattcaccaagtgtttagtaaatgcctgctatatgccaggtattctgtttatgaagcacgtaattgggtaggaggtggcatgtgatggttcgttttctagctggctgagatgatgggatataggatcactagctctagggaggtggagacatctatgaccctttcaggtagatcaatgagcaaggaaataggatcaagtctcatatatttcacatgggcagaaatttggcagagacagaacaccaggttagcagcaaatattgctaagaactagagccaggaactagaaagtatatagactaaatgtcaatgccttcaatcttttgctttatttttacttttgttttagtaacggggtataaataaaaaaatataaaacagtagataattatctagagcactcataaataagttctaggtagctaagtttctctctttaagcatgaaaacccttaaccatttggaatgctcgaaattaaaaaacaccacacatattactctgcctctttaagttgaatctaatttaacattttctaggtgtctggatcgtatctattccagagtaaagtcatgatggctttatgacgttctgaggtatgtgaaattgtctgcctgactctaacaaggcctacactgtcctgagttctgagttcttgtgtccacttcttatagcctgtctgtccctttccttgctactctgggatcaacagtcacctcttgaacttttggggtgcttggcaatagttcctctccctactcctaatttacggcaggccttagaaaccataaccttattttaaaggtgtaaaaaaaaaaagatttaagacaaaagcaaggggcttgggtgctttccttatggacttaggcctggtaacatctgttctggccacttagaggccttgtgtgctatttcttgttttcaggtgcgttttgcaggaggggacgttgttgagttccaaacaggtgaggtattgcacactagcaaacacatgagaagaaggcggaggaattgggagaaaaataaaaagaatgcagcaggccaggttagcaggaacgttaagacggtgacggagaacagcaaagcctggaagcaagccgccgtggagaaggaagaactgtgctgaggtgagttgctgtgacaacccaggctgattttgagtatgtaaacaccaaaccttgttcttggctgccgctcagctcagcgggctttggagcctggctgcccagccaccacttcagggatgtgctgtttttagggagggtgtgaccctacaagatgtttctgagccttaatgcttttttgtgggagccaatgcttaatatggtggctagagttacctgaagaatctataaaaaatgaccgaagccccttctgctcaccctcccactcatcagagttggcttccgtgggtctgagtgggaaggacttccacttttaacagcatgagacacggttctgacagccccactaacatccgaatgcaggccgcagtgctcagtcctgaggataaaattctcagcttggagattggggttgatgccttacctttattagcaccagatgggtttgtaacaacccagaggtttgtaagaacttgttggccgggcgccgtggctcacgcctgtaatcccagcactttgggaggccgaggcaggcggatcacctgaggtcaggagtttgagactagcctcaacatggagaaaccctgtctctactaaaaaaaatacaaaattagctgggcgtggtagtgcatgcctgtaatcccagctactcgggaggctgaggcagaattgcttgaacctgggaggtggaggttgtggtgagccgagatcacgccattgcactccagcctggcaacaagagcgaaactccatctcaaaaaaaaaaaaagaacttgtttggcagcactgtaactgttccttctttttgattgtttgtttaaagcagggacttcagaaatttattagcaggcgaaggatgatgacctttagtacactccaaacctgaggatcttctactagaatgggacctttataatccctaatgctagggacattcaaaatgcgtgttttttttttttttttttgagacagagtctctgtcgcccaggctggagtgcagtggtgcaatctcggctcactgcaagctccgcctcccgggttcacgccattctcctgcctcagcctctccgagtagctgggactacaggcgcccgccatcacgcccagctaattttttgtatttttagtagagacagggtttcaccgtggtctcgatctcctgacctcgtgatccgcccgcctcggcctcccaaagtgctgggattacaagcgtgagtcaccgtgcccggccaatgctgtggtctttcaagcagctgctgggatacatttaatttgtacaagccctcttcaggggttgtagtcaagcacagggagtggatagaactgtattattcagtctctggacttcactcagttccaagtgctgtttgtgtcagggaccagatctatcacaacgtgcattgttagcgggaacgttttcttatttcctgtacaatagttgtgagattacttattaatcctaaagttgtgaggtttcatctgaagaaacagaaatggactgtttccattaagtctggtaaatttggctgggagtggtggctcacacctgtaatcccagtgctttgggaggctgagacgggagaatcactggaacccaggagtttgagaccagcctgggcaacatagcaagactctgtctctacaaaaaataaaaaaaatagttgggtggggtgggtggtgcgtgcctgtagtcccagctacttgagaggctgaggcaggaggatcacctgagtctggggagacagaagctacaatgagctacgatgatgccactgcactccagcctgggcaacaaagttgttttttttgagaccctgtctcaaaaataaataaataaataaataaaaataaaaaaaatataagcggggcacggtggctcatgcctgtaatcccagcacttcgggaggctgaggcgggcggatcacgaggtcaggagatcgagaccatcctggttaacatggtgaaaccctgtctctactaaaaatacaaaaaattagccgggtgtggtggcgggcacctgtagccccagctactcgggaggctgaggcaggagaatggtgtgaacctgggaggcagagcttgcagtgagccgagattgtgccactgcactccagcctgggcgacacagtgagactccgcctcaaaaagaaaattaaaataaaataaataaataaataaataaataaataaataaataaattgagcaccccaaacaacttttgttaatgtgggaactatatatcaatgtctactgtgttagaaaataagactaaaaactgggtgtggtggctcactcctgtaatcccaatgctttgggaggccgaggtgggtggatcacttgaggtcaggagtttgagaccatcctggccaacatggtgaaaccctactaaaaatacaaaaaccagccagacatggtggcaggcgcctgtgatcccagctacttgggaggctgaggcaggagaatcgcttgaacccaggaggtgggggttgtagtgagctgagatcacgccactgtgctccagactaggcaacagagcgagactccaaatcaaaaaaaaaaaaaaaaggaagaaaataaaactaaaaaaaaagtaaaagatatgattaattcagtaaaaatattaacagtaaaactactacacattatattaatataaataacatactttaaatgtaaaccactatatttcccaaaacaatcaaagaaataaagccatctaatgagaagaatgccactgttttacattttcataaatttatggcctctgtctgacttaatagaagatgactggattctcaaatctgcttctgcatttaatctgttgtaatatgttagtttggttaaaatatacaaagaaaatctggctttacacagacagagaaagtatctgcattttcagataattttggatattctttagcgctacatcaaaacttgacaagtagtagtttcttaacagttaggaacttttgttataataaaacccattggcttctcttgcactttgaatggatattttaccatgcatgactttgtaacatcacacatagatcactgcaaaatactggttccctgttgttaggcagatcttctaaatactgacatatttcattagaatacatatcaaaaaatcatattccttaaatttcaccattgatttcagcagaaaagtctgtatatattgaaaagtggtcaagctcatgggagtggatacaagttttccaaaattctaatttttacttgaaagtgtaaattttatcactggctacaaatattgtcatttgtttaccttgaagtgacaggctcacttcatacagtttcaagagactgtctgccagatgcctaagtctaaaaccatagtttgtctatcattctttcaagtaaaaatggtggtcggtgaaaaaagaagctgctaaatcaatatgcaacttgaataatcgcccaaatgcttttccttgtgacaaccaccgtactctaccagtgtgcagcagaggcggtttatgcatatttcccatttcttcaaacaagtttaaaaagatgtactcaggatcaggcatggtggcccacacctcccagcactctgggaggccaagacgggtagatcactttaggtcaggagttccagaccagcctggccaacatggcgaaaccccgtctctactaaaaatacaaaaattagctgggtgtggtggtgcataccagttaaaaaaaaaagatttattcaaggactgacatttgatacaattaacaatatttagcctgggcgacagagtgaaaccccatctctaaaaacaaaacaaaacaaaacaaaaacaaaaattagccaggtgtggtggtgcacacctgtagcctcagctactcaggaggctgaggtagcatcacctgagcccaggaagttgaggcggcagtgagctgtgatgcccccaccgcactctagcctgggtaagaccctgcctcaaaaaaaaaaaacaaaaaaaatttaccacttcatcaacgattcttaagtgaaactggctctgttttgattgtgagtgcatggcagtaaagaatgcagtgaccactggtacagtttggtgtcaccgtcctgatttgtgctaaggcgccagcagttttaccaccattttgcaacatcagtgcaagtgtcaacatagggaaaagacaaatacatcttagtagtatcatgaaaataatttttaccccaaagagattccttaaagaagtctcaggaacttttaggagtagtctatggactgcatgctgatatggaatgatttgttttaatctttcatcttctaatacccaaatccactagtctttcctttctccctggtttccttgactgccctgctgtgttttcaatctttttgaaacttctctttcactggtttcattggttttgaatacagttatctcttggtgtccatgaaggattggttctagtactcgcagcagacaccacagatgctcaagtcccttatataatatggtgtagtattgcatgtaacctatgcacatcttcacatacactttaaatcatctctggattactcataatacctaatataatgtaaatgcaatgcaaatagctgctatatagcatattgttttttatttatatttttattattgtattattatttagcttagaatccatgaatgtggaacccacaaatatggagggctgactatacacagtttcctggatttttttctactgagatataatttaccataaaattcacccttcaaagtgtaaaatgtaatgttttttagtatattcaaaaggttgtcgccgggcatggtggcttatgcctgtaatcccagcactttgggagccggaggagggcagatcacgaggtcaggagatcaagaccatcctggccaacatggtgaaaccctgtctctactaacaaaaaattagctgggcgtggtggtgcctgcctgtagtcccagctactcaggaggctgagggaggagaattgcttgaacccaggaggcagagattgcagtgagctgagattgcgccactgcactccagcctggcaacagagcgagactccatctcaaaaagaaaaaaaaaaaaggttgtgcagccatccccactatctatctaatttcagaatatcttcatcacctcaagtagaaaccccatacatgttggcagtcatttcccattctctcttaactcccagagcctggcaaccattcatctactttatgtctctatagattggcctattctaggtgtttcatataaatggcgtcaggcaatgtgtagacctttgtgtctggcttatttcacttagcatgttttcaaggttcatccatgttgtagcatgtatcagtacttcattcctgtttatggctgaataatatcccgttgtatggatactctgcattcttttttttaacatttaaaaattttttatagacaaggtctcactatgttgctcaggctggtcttgaattcctgagctcaaatgatctgtccacctcagcttcccaaagtgctaggattgcaggcatgagccactacgcccagcctggatactctgcatataatctacccattcatcagctgacaaacaactgggttgtttccactttaggaacattatgaagaatgctgctacaaacattcatgcattttgtagagacagggtctcactatgttgcctaggccggtcttgaactcctggcctcaaatgatcctcctgctttggcctcccagagtgctgcaattacaggtatgagcccatgtacaagtttttgtgtgaacatatgtttttatgttttcaattctcttgggtatatacctaggaatggatctcctggatctttttcttttttttccctttgggacagagtctctctgtgttgtccaggctgaagtgcagtggcatgatcttggctcacggcaacctccgcttcccaggttcaagtgattctcctgtctcagcctcccgagtagctgggattacaggtgtgcaccaccatgcccagctaatttttgtattttcagtagagatggggtttctccatgttggccaggctagtctcgaactcctgacctcaagtgatcgacctgccttggcgtcccaaagtgctgggattacaggcgtgagccaccgggctgttgcccacgctggagtgcagtggcatgctcacagctcactgcagcctcaactttctaggttcaagtgatcctcccacctgagcctccctagcagctgggactacaggtgtgcacaggaccggctaatttcttgtagagttggagtttcaccatgttgctcaggctggtctcgaactcctgagctcaagcaatctgcccgccttggcctcccaaagtgttgggattacaggcatcagccactgtgcttggccaatgttcactcttactttctgtgcttacttctggcatgggttggctgactacaatttgaatagacccatctttccgtttctttcaccgaaggcattttttctggctcctagatgttgctgacccccaggatccagtcttggccctccactattcttgctacactgcttctttggaaactcatctactctcaagtaacttaatataatctttatgccaaagacagatccacatctttagttctaacttctttttcagttccacatttcctacttccttgctggacagttttaatttgatatttcattaccatctcaaactctgtataactaaggcataaatttctccctaaatcagccttctctgggctttttttttttttttaaattaacagtgttaccattctccaggtcacacaacattcaaaagtgtgttttcctgccagggcatggtggctccacgtctgtaatcccagcactttgggaggccaaggcaggcggatcaccaggtcaagagttcaagaccagcctgaccaacatggtgaaaccccatctctactaaaaatacaaaaattagccgggcgtggtggtgcatgcctgtaatcccagctactcaggaggctgaggcaggagaatcgcttgaacccaggaggcggaggttgcagtgagctgagatcgtctcactgtactccagcctgggcaacagagccagactccgtctcaaaaaaaaaaaaaaagtgttttccttcttcatattggttctctgttatctagtcatgaaatcctgttgattcctcctttccagtctctctcaccatcactgtcaccatgaccatcaccactccctttttcctctgctgatttgcagttaaaacccttatggatctcacccttaaatccttgcaatggcctcctacctgatctctgcctgcaccacgtcttcccagcagtcctataccggggtaatcttccttcagctcctgctcagaaaccatcaatagctcccagctgactactcaacagagtcagcaatcctgtctgttctaccttcaaaataaatccaaaatctgaccacttctctccgcctctactgcttcccctggtctgagttgccactatctctggattattattattaatatatcattattatattcaatgtattatcattatatacttgcctcctgactgatctcaccctgcctttgcctcccttcagtctagccttaatgaagcatctagagggttctattcaacttaagtcagcaggtcactcctctgctcaaagccctctcaaggcctctattctcactcagatcaaaaggctgattgccagcacccgcaggttctgtccctctgcccgggccccactgtcctctgactcatctctcaatctggcctctacccttctgctccagccccaaagctttcccttcctggaatgttaagcaggtccagccttggtgccttcacatggtaagttccttgcctggaaggctctttgcacagataagctcaaatccttcctacacctcaggtcctttgtaaaatgtcaccataagtatcagtgaggacttccctatcttatctagaagtgtatacaacactacccctccccaccctgtaaccctcccccatcacacacttcttgttcttctttcctgctttttctatttttcttctcagtacttattaccttttgacataccatatatcttacttttcagtctttcaaagcagggattatcatctactttagtccctaccgtaccccagtgcatagtacagttcctggtacacaaaatttctcaaaaagtattagctgaatggccgaacaatgagtgaacaagtgctctgtactctaggcagtcaatacaatatttattaagcactcactatgtggttagcattgcattaggcattgggggaatatggtagaattttaagaggtgctttctattcttaaggagcaaaatcaaacaatgatgttctatgctaagggctaactgtatggaatagccaatgttgtagaggttaaagagaaatcaatctcgaccacagtggtcgggagaagtagttcttgaacagagaagagatgacggcattccaagggaggataatgtagtaaagacacagcggtaggaaggagcatggggcattcactccaagagactgggctaatttcaagggaggaaaaatattgtaacaaaatggatgggaaagtgaaaaaccaggcagagtctgaaattgataaatgggaaaaaaaaaatcaattgactaggtgtaggagaaggaaaaggacaaattaaagatgtttatgccactgatataatggtcttcaggtcttcaaacctttttgctggcatagctcctagaagaattttgaaaaactgtatatcctcctttcacattttaaagttgccatctaaaccttatgtttttatttctttatttttttattttcttgagacagtacttcactctgttgcccaggctggagtgcagcggcacaatcacagctcactgcagtttcaacttcctgggttcaagtgatcctcctgcctgagcctcccaagtagctaggactataggtatgtgccgccatgcccccaaaacaacagcaaattatgtgtgtgtgtgtgtgtgtgtgtgtgtgtgtgtgtgtgtgtgtgtgtgtttcaagacacagtctcactctgttgcccaggctggagtgcagtggtgcaatcttggcttactgcaacctctgcctcccaggttcaagcgattctcctgcctcagcctcccaggtagatgggattacaactgtgtgtcaccatgcatggctgattttcttttctttttttttttttgagatggagtttcgctcttgttgcccaggctggagtgcaatggcgtgatctcggctcaccgtaacctctgcctcctgggttcaagtgattctcctgcctcagcctcccaagtagctgggattacaggcaggcgccaccacacggggctaattttgtatttttagtagagacaggatttcaccatgttggtcaggctggtctcgaactcctgacctcaggtgatcctcctgccttagcttcccaaagtgctgggattacaggcgagagccactgcacctggccgcatggctgatttttgtatttttagtagagtagggtttcaccatgttggccaggctggtcttaaactcctgacctcaagtgatctgcctgcctcagcctcctaaagtgctgggcataagccaccatccctagtcagtgtgtgtgttttgaggcagggtcttgctctgtcgcaaaggctggagtgcaatggcacagtcatggctcactgcagccttgatctcctgggctcaagtgatcttccgacctcagacccctgagtagctgagaccacaggaatgtactaccacattcagataattttaaaattttttgtagagatggcatcttgctatattgcccaggctggtcttgaactgctgggctcaagcaatcctcctgcctcagcctcacaaagtattggcattacaggtgtgagctactatgtttggccgtgtgtgtgctttctaatgcctattgaaggtgtgttttaagtgcttatggcagatgtctgccatgcaatctaaatggcaaaccaatcagctggatcagtcttacttacaacacacctggcctgtccctcaacttttctattctttcaccaaaatggaagttccttatgttagagaacttacagagaaaaggaagacaaaggaaaataggaaggagagttaagctctgcctgacactgtctacttaagtgatgggtaactgattaggttcagtgcttagaacttcatataatgagatacaaaatctcattactgacccactctgccagctagaagagcacttgtagatcatggacatttaggtggggatatagccacctttgatcctttctgttcactagattaagccttgttgctagtacaggcaggagccaacataccttccacactccagcaatcctgtacaccttgggctgagtcatatgctgaacagttattcatgaatacagattcttacttagaactgaagaattacctgctccaaacccttcattaggtagataagagactaaggtccaaaggggataactggcatgcccaaggttaacagagcagagctcaaattagaatccacatcacctgatttccattctactattcttgccacatgccttggcacttggcagtgacctgggagtgaatcactaataaccagctgtgtgctcttttaaagctacagctctattattctttgatgtccagataacaatctatgctccagcacctgtttatagacataagcacacccatttttatgtttgcttatcctcctattgaaaaatattttaaaagttcattttaatgctaaatttaggtgtactttctttgttaatctaattcttgagcactctgcacccttcagcagttcatttctgaaagttacctccacctaaatagctcaagcattgtgacagctgtgatacaggactcatggaaactgggacaagtgatcaaaaatgtctgagggaggaacaatagaggggacattttaaaggtaagctattggatagttgttacctgtgagaaagaaagaaaaagggttaggttaagaaatgttagttttttactctctcaacccagccaaacaacctaaacttgaactgtcccaaaggcctaccaaaattctttaatttcttcacttaagctgagtgctcttaataagcaagacttctgaggtgtagtgctagtgattaatgttatacacacccgttggctgactggtgaaacctgctgcaataactaaaaattattctataaaaatgtatagacagagagaatgttaaagctaaaagaggccgttgactcatttctttgttttagtagaacaggtgcaacagattgaggcactttaagacatctaaatggctttactagcaaagataaaaatcacacttgcctgtactcagggaattttatcacattctaattctttgtaaatcagtgaatcccctggtgcaacttctagccagattatctgggctttggaatcagaattatctagtttaaaatttagctctgcagcttgggcaaattacttacattctttttttttttttttttttttgagacagagtctcgctctgttcctcaggctggagtgcagtagtgcagtcttggctcactgaaacctctgcctctcaggttcaagcaattctcctgcctcagcctcccaagtagctgggactacaggcgtgtgccaccatgcctggctaatttttgtatttttagtagagatggggtttcaccatgttggtcaggctggtcttgaactcctgacctctggtgatccgcccgcctcagactcccaaagtgctgggattataggcgtgannnnnnnnnnnnnnnnnnnnnnnnnnnnnnnnnnnnnnnnnnnnnnnnnnnnnnnnnnnnnnnnnnnnnnnnnnnnnnnnnnnnnnnnnnnnnnnnnnnnnnnnnnnnnnnnnnnnnnnnnnnnnnnnnnnnnnnnnnnnnnnnnnnnnnnnnnnnnnnnnnnnnnnnnnnnnnnnnnnnnnnnnnnnnnnnnnnnnnnnnnnnnnnnnnnnnnnnnnnnnnnnnnnnnnnnnnnnnnnnnnnnnnnnnnnnnnnnnnnnnnnnnnnnnnnnnnnnnnnnnnnnnnnnnnnnnnnnnnnnnnnnnnnnnnnnnnnnnnnnnnnnnnnnnnnnnnnnnnnnnnnnnnnnnnnnnnnnnnnnnnnnnnnnnnnnnnnnnnnnnnnnnnnnnnnnnnnnnnnnnnnnnnnnnnnnnnnnnnnnnnnnnnnnnnnnnnnnnnnnnnnnnnnnnnnnnnnnnnnnnnnnnnnnnnnnnnnnnnnnnnnnnnnnnnnnnnnnnnnnnnnnnnnnnnnnnnnnnnnnnnnnnnnnnnnnnnnnnnnnnnnnnnnnnnnnnnnnnnnnnnnnnnnnnnnnnnnnnnnnnnnnnnnnnnnnnnnnnnnnnnnnnnnnnnnnnnnnnnnnnnnnnnnnnnnnnnnnnnnnnnnnnnnnnnnnnnnnnnnnnnnnnnnnnnnnnnnnnnnnnnnnnnnnnnnnnnnnnnnnnnnnnnnnnnnnnnnnnnnnnnnnnnnnnnnnnnnnnnnnnnnnnnnnnnnnnnnnnnnnnnnnnnnnnnnnnnnnnnnnnnnnnnnnnnnnnnnnnnnnnnnnnnnnnnnnnnnnnnnnnnnnnnnnnnnnnnnnnnnnnnnnnnnnnnnnnnnnnnnnnnnnnnnnnnnnnnnnnnnnnnnnnnnnnnnnnnnnnnnnnnnnnnnnnnnnnnnnnnnnnnnnnnnnnnnnnnnnnnnnnnnnnnnnnnnnnnnnnnnnnnnnnnnnnnnnnnnnnnnnnnnnnnnnnnnnnnnnnnnnnnnnnnnnnnnnnnnnnnnnnnnnnnnnnnnnnnnnnnnnnnnnnnnnnnnnnnnnnnnnnnnnnnnnnnnnnnnnnnnnnnnnnnnnnnnnnnnnnnnnnnnnnnnnnnnnnnnnnnnnnnnnnnnnnnnnnnnnnnnnnnnnnnnnnnnnnnnnnnnnnnnnnnnnnnnnnnnnnnnnnnnnnnnnnnnnnnnnnnnnnnnnnnnnnnnnnnnnnnnnnnnnnnnnnnnnnnnnnnnnnnnnnnnnnnnnnnnnnnnnnnnnnnnnnnnnnnnnnnnnnnnnnnnnnnnnnnnnnnnnnnnnnnnnnnnnnnnnnnnnnnnnnnnnnnnnnnnnnnnnnnnnnnnnnnnnnnnnnnnnnnnnnnnnnnnnnnnnnnnnnnnnnnnnnnnnnnnnnnnnnnnnnnnnnnnnnnnnnnnnnnnnnnnnnnnnnnnnnnnnnnnnnnnnnnnnnnnnnnnnnnnnnnnnnnnnnnnnnnnnnnnnnnnnnnnnnnnnnnnnnnnnnnnnnnnnnnnnnnnnnnnnncaaaaaaaaaaaaaaaaaaagcgaaaatatttgcaaaagtagcatacatgtacttccttcaggccacttaaaatacttatgcatgtctaaatattttatataagcatacctacacctaacttcttaaaaattgagtattctttttttgagacggctgtcgcccaggctagagtgcagtggcgcgatctcggctcactgcaagctccgcctcccgggttcacgccattctcctgcctcagcctcctgggtagctgggactacaggtgcccgccaccacgcctggctaattttttgtatttttagtggagacggggtttcaccgtgttagccaggatagtctcgatctcctgacctcgtgatctgcccgcctcagcctcccaaagtgctgggattataggtgtgagccactgcgcccggccgaaaattgagtattcttttaatggattttaagatataaaatctcaggctcagaaatttgagccacctaggggtgagaaattttggcctttgcccgcttcgaactgacttaactaaattaaatctatagaaagtaaaaaataaaggtctgtgaatgtacccagtactctcaggaagaagcatatttgccatgaagctaaaaaagcttcagtttcactccccttccaaggctctggggggtggggtgggggcgggagctagcaacgtgctcacatggtcatatatttttgtaaaacttatagaagatatttttgtattctttttcttaaagaagatatccaagattgtataagcttcagatcccagaaatcctagatttaaaaaaaataatcaaccaccaccccaacaaaattaggcacatgcctgaaaattctgctgctactgccagaattctgcgggtaggggcttcatccaaggtgttcctaataataggcagagtccccagattagttccggtgaggcttttgggaggggttatttggcgcggtgttggtgttggtaggatcctggctgtgaggctgaggcaggcctgaggagggctggggctgacaggtaggcagagttggctgggatgtgaggtgcaaggggtggtacttcggaaacaaactttgaagaggagaaggggcagcaagactgtgagtctggactttgtgatacactgtcacccctagtttagtgtgcctggttagggagaatcaagcagcatggaacccctcttcctttttcactaacatttttctgtatagtggttgaaacccagtgttaagagactgcatgacattggaaaagaaggggaggagaaaaagagtccatatga

SEQ ID NO: 1135 - DNA, 7461 bp, Homo sapiens
tagtggtgaaaaactgaacaaacagaagtgattttatctaatacagttccaaggtagaaaaagtggagcaggcagggccttgcacccctctccacccccccatggggggggtggtggtagcggcacatacacaatcatagtaaattggcagaagaaaaacacaatagattcctggctagatggggagagataaggcaatgtgcatgggggaatcagaggggagatgtgagcccctctgctcctcccacaagagtttcccctttgggccgggcacggtggctcacgcctgtaatcccagcactttgggaggcggaggcgggtggatcacttgcggtcaggagttcgagaccagcctggccaacgtggtgaaatcccgtttctactgaaaatacaaaaattagctgggcatggtggcgtgcctgtattcccagctacttgggaggctgaggcaggaaaatcacttgaacccaggaggtggaggttgcggtgagctgagatcccgccactgcattccagcgtgggtgacaaagcaagacgccttctccaaaaaaaagtttcccctttggccccaaatgaagacttggctggcagcagaggcacagctggaagcatcgatcttccacctccctggcttttccattctctgctctggggcaaaggagtgctgtgaaaagggagacgagtagtttctgcaccagtcccgcacaggccacctgcaagacaagaggagtttggaaggctggttagttactcctgtaattcctggtctatagcccttccagatgtttcctagcatgcctcaataagtcacagtagtcattgcccatactgtgttccttagtagccaggctaatccttggaattcaccccagatttctaatactattgtttttttccagtctgttgctctattctgtaacctggtggtagttttagtttagctgtattaacttaccagggaaatggattattccatcttctttaacttctctttccttggcaccattgctttgtgaatataaggcaatatgaatagtaggctcaggaagaagatgtggccaaggaaatagatggatttatacacctgtggagagagaggccactaaggtagacaggcctggagtgtcctttgcaacctttgaggttgcagtgagtccctcccagtctcacaagcaggccttcacttgccttaagccatttgtcccacgtgaagaggcagaaggcagtcatggagtaacccatgaagagccagtggatggtctgttgcaccaaatagtagaagggctggaggacagtaatggcggccagcttgctcagggtggggctctcttgaatgagcctggcagcctggggagggaggaggagctcatcagcatcttgtcccttatattccccttcacccccaccctggaggcctacctgtctttccacaataacaatgaggaattccatctggaagcagaccaggtatcctgagtgcaggccgtgccagagggccaggaatagcaacgagagaccctgagagagttctttatttccaaggaacttgagtcgtttgaagatgtagctggagaaaagggtgggtggggcgaccctcaaactgactggtccttgcatcccgccacctgcctctgggtcctcaccctgaggattggattggagtgctggtgggttcccacgtgtagcccccagagggtacaggaggcagtgctgactgattacttttagagatggaaagcagacccaaggcggagctggagaccgtgtgcgcacgagccacttggttcagcagcagtgactgaggctgatgctgagatcagtggtgaaccagacactctactcaagctgcccacactctagtggtggggacaaacaagtaaagctgttgataaacagggcagtggaggacataagtccattggcagagctggagtaacacccaggtcttaacgcacttttatatcttgcctttttttcaaatatgacagtaatggtttttttgggaggggggtataggtgggggtcaaagtcagtgtgagcgacagggggttctgcccagatgggaaagacgcataggggtgacatggtacacccctgccctccaatctgggaagacagtggaaggaaggaaccagggtccaggctccccaccagcagctcaccgggccacccaggcgttggtgttgatgttgaatgaggcaatggtgccagtgaagcgggggtttgtttcaaagagccacaccttcatgttggcacaggcatcccactttgccttgcccttttcttcaaagccattgaagcccaggcccgtcaaaatgcatactccttcctgagagggaatagctcagttagggctcttgccactccccatactggcccccatggcttgtctaaataggaccttgtttcaacttttctacttactgtgaccagccaacaggtgacatatttgtacagcacaaacttgccccagatcagcatgtacatgcagcggaaccagaaggggtggttcttgagggaagaaagcacagtgcattagggatatcacatgactaggcagtttctctcagcactcttccttttcacacttgtggctggctacttcatacctgcctgagtcctgctgccagatgccctcaatagtctggcctgattgccttcacaataggcagagaggaataagcagagggcctggagaatattcattcgcctttcccttggagagcctcaagggcagcactgtatttaacttctctactgtttgccttcgttggcaaagtgtttggaatgagcatttggaatgttaagtacagaggggcccatattggattttaatttaaggagagaaacctgcccagaattactgaactgttttcaagcctttcagctgggcaggagcaaaagccagcacttccccccttcccttggtttctgaattccctagaagtgcccaaatgtatcagtcaagagaagaaaataggatggagaatcagaagctgctgtgctctgaggggtcacgtggatgtgataaggcaagctaggagcggctcctagagaaggcaacgggtgctaaatgtgcacctggcacagccctgtgcccgcgaaggttgttcagtgctggctgatgaacatgtcccagcacggctggcattgacaactcacagatctagagcaaaaccaacatgcacttgtagatgatatttcctacttctctgctatctgtagggatccttgcctgtccattttctagctctggtgcagtcatgctgctgctgctttagtagacactcacgtcatagtcttcagtgaggagatagtcttctgtgatgtgggggctgagcagtgtgtagcccactaggtagaaaaggcccagactcaggcgcttgagagcaggaatgatgctggaaaggaacgagtgaagttcctggtcacagagagcagagactattcccttcaccctctgaccttcagttatggagaggagtgtttaggggtgtggttgtctacctggaatgggatgagaagctctgctgcccaaagtgtttcctgtttcagggaaagatttctatggctggctatgaggaatggggactgcaaacctcttaagagttgtaggaaagtcagggcagcagacagtggaccagtcttgtgtttacccctcagggatgctactgatctcaaggtcttgccaggtctcacaatctccattgggactgaaaacccagtggaggtaagataataaaaataaccactttgaatctgctccttcatttcttggttgaattgatgctgaaacacaggatggacaagttctcagtgaaggaattcttctggcaattaaactttttttttttttttttttttaccattttaatttttattttctagagtcagggccttgctctgccactccggctagagtacagaggcatagtcattgctcgctgtggccttgaactcctgggctcaagcgatccccttgccttggccacctgagtagctgggactataggcatgtaccaccttgcctggataatttttttttgtagagatggggtctcactatgttgcccaggctggtcttgaactcctggcctccagtgatcctcctgccttggcctcccagagcgttggcattacaggcatgagccactgtgccctcctgcatttcctactgataaatatttttgagacaggattttgctatgttgcccagaatggagtgcagtggtgtgatcaaagctcactgcagccttgacccacctcccctggactcaagcaattctcccacttcagcctcctatgtagcttggactacagatgcatgccactatgtctgataatttttgtatttttttgtagagacagagtctctctatgttgccaggctggtctagaactcacgggctcaagtgatcctcccacctcggcctcccaaagtgctgggattatagaggtgaaaccactgtgcccagcctctatctacctacctacctatcaacctgcctacctacctatcaatcataaatatatttcatatatacatgaaaataggctttaaaggcagaaatgtgactggttcaggcaaaatcctgtggcataaatgtggatttttatgtttgtactagtgttagaatggataactggaagaaccctaaactaaaaagggcccactcctggcacagagtgcctgttacaacagtccagggcctgcatgactcaggtctctatgccagggtcatgctggagaatgcagctttcagaagagtcacttcagagtgagtgaaatacctacacaaacatctggaccaagaggggcaattacctgtttggtatctttcctggtatgtcaatcagctctccctgcaccagcttcatgtagtgattcattgagaactggggccctaccaagaaggccccatagaagtaggagaaaccagcaacttccagcagggaaggaacaccacgtatggcatatttctgttgctcagaggacaaggaattctatgccaagaagagaatgcatggttcaggatagccttgaatctccccacaagagccactttgagtgttccccacctgtgtgccccactgactggggttcttcaaatagccttctctttgggggatgacaaatagttgcttcttgtggaaatgcgtatgtgtgtgcatagctggctgttgctgctttagcaaatgccttgctggcattgatctctggactttgtgcaagagctggatcctgggcaaattagatttgttgatccttgctcagtgctatctgaaagggagattgcacaggctggggaatgagggagagctccgctctggaatttgggttcagtcttttgttaacaacttttttcttccctttcattaagtcttgaacctctctgccgatgaatgggtacttacctgatctttccctccgtcaaagtagtcaacagccaaacctgagcagagagagaacggatgggtagggtggtgggagaggacactgaggatgtggcctgtagactgagtgcagccagaagtgtatggcggggggcggagggggggtgccgaggaagtttttagtgagatgggggagggacctacatgtaaggaaggcaggcagtgaccatcactcaccaatcagcttcaaagtcagaacacaatgtggcattgtccacttgatatcgtagttgccggtggcagtgtaatagtatccagccagaaggtaggcctaggagaggcagaagtatttattctagcatcactactatttcttctccttgctctgaaattcaatgttctctttcctttttcctttctcctcatcccatcattaaaagccttaataaattcctacaaatggaggtgctgaaaacctgtaatgggaagagcgttgctcaaggcttcttggcaaaatgagggctaaactgagatgagaatttagatgctgggaccacaggtgcatgccaccccacccggctaatttttaattttttttgtttcaccatgttgcccaggctggagggctaatttttgtattttttttgtagagatggggtttcaccatgttgcccgggttagtctcaaactcctgggctcaagcaatctgactgccttggcctcccaaggtgctgggattacaggtgtgagccactttgcctggcctaggcttaggttctttaactcattctaagttgcttttctgtcttgccttgaagtgactctgctcctggatagtgggttaaaccaaagagcctaatggcacagtatgcaaagggttagctggtggcccttccttgaggcaggcaaagagttaccattacaatctgtggatggaacacttgggcctgtgataagccacctacctgaagtcatactgctaagtgctgggagaggggttagaaattaggtctgctaatttctataccacagtcccctgcctacccctgtcccctgaaccgctgtcagctgtagcctgagctgctaagggaaagacgtttaccatctggaagcaaaaggtagtgaggacggcagtgatggtgcggcccattagtcgaaggatgaggaactgaagcacaatacacagcagggagtggtagagctggtttcctggatgcaagaagagagaatttagcctggtttttacactcccaccgtcctgagacttccaatcacaacgtaatatataaagaaaaaatgttggcatcaggatcttttttttcagaataacctcatgttttggaggagaggatggaaattatttattaaaataaaaaagattattagggtgttattttatttcttttctttttttgtttgtttttttagagatgcgacttgctctgttgtccagacttgagtgcagtagctcaatcatagctcactgcagccttgaattccgggctaccacacccagcttgttactgtatttttgaatgtctgaagtgaagaatgaatctaagtggggactgcttggctcggtcattcagttacatccacagcacagagaaactgaggattctttgttgatgaggtatggcaagggtaaccaccctcaaaatgtttttatctgacagaagaatgtacataaaagaaaaaaaggaaaagttaagctgtgttcctcttcatacaaccctctttgcaagtgggagcattataacttccctacctattagattctctcaaggaaattttgttcaagtctgttccttccaggttcccactaattgcggtgtcactgctaatttagtttactcaccaaagttaaaataagcaattgagaggcctgtaaaggtatggaagaggtggatgaggtaggtctccttgtagaaaaggtaatgccgataaaacaaagcaaaggggtaacctagatgggggaaaagataagaagagtgttatttgtgcctggtgccatcccagtttggtttggaagtttatctggcatgaaacgcagcccagagggagaga

SEQ ID NO: 1136 - DNA, 5775 bp, Homo sapiens
gccacgcgatccactgggcttctgggcacagaagtgcctcaacaggcacaggcaggctccccacagccacaaggaaccctgctgccaaggaagcagctcctgttggggtcatcagatttttaatctggctcagcaaagccatggctgtccagccttaaaaaaatgggtgatgtgggagaaatggagggtgtgtgaagagcacagctgggcctcgagaactcagggccagccttcccagcttgggtcctgtttcggagcccaggccttgcttccccttagccgccccagccagattcttttgcgccccctgctggcacacacaaagacagacccaggagcgcacatgtgaacgtgcgcatgcttgctgccagttacccagttcatgaacacgtgaagccttgacttcaggttaagtaataaaaatttattgagaattcctgggttggtgtttatctcctcccagccttgagggagggaacaacactgtaggaaatcactgagaaatcacgcactgtccccaacagccccagttaacacagggaggaggaaagtaattccccagaaaaggggctagtcttcagtcttccttaatccaagaggggttcagggaaccggtgtgggggaccatcgcatgatactggggcggggtagggctgtgctggacccctggctggctcctcaaaaactggagaagcagatccacttcctctgggggtggagttcttggtgactaggctcatttcttacccttgatgaggctgtcactgtaggaaaaaaaagatagataatgacattattaggggacataaatgtgagaggcaggacactctaggccattccctctacgaccctcctaccctgattgagggtttgtcttcggggaggtgggaaagggggtagggtaggaggcgggtactggagaaggtggcctgcaggaccccacagaagcaacaacagcttaccttcccctgtggtgccagatcgccagatgaacaagaaacagagaagagaaatgcacatgttaattgacagcttcaggccccactcagctttgaaccctcctttgctcccaagagaaaagataaacagggttgacagccaggaatctcaggctcatgaaaggaggaggcatgttctcatggccactgctatttctcatctcctttcctaacatccctccattcaccagaggagtttgagggctcttgagtaagaaaactgagtatcatctttcatcactttttggttagatgaaaactttataattaaagtgctttttatgtgaataatcctatttgatctcataaaatcaatcctatgagatgcaagatagaaactgtcaaccacccccttttctaattttggttcaatgtctctgagccatatgaatagctgtagcaggctccagagcccaaacaaccagactcaggtcccacgttcttggtgataccccacagtgtggccacatctctcacctggtgaaactttcatcctgtaggttcagcacaaggttgtcagctgtgagatagatacgattctgtgatgtggcgatctacagggcaggaaataagacagatgcttgcattaagcaaagacctcaattccgacccctgcaattcagcagctacttaacatggaacacatgcagattagggcaggggtgcagcaatgagtaacacatggtttctgctcgcacttagggatccagagcgctgagcagcagctatgattagaacaaaaggtcagggaacccagaggaatcattcttgacaggaggagtatcggagaagccaattttttatttatttatttttgagacggagtcttgctctgttgctcaggctggagtgcagtggcatgatctcagctcactgcaacttccgcctcctgggttcaagtgattctcctgcctcagcctcctgcgtagctgggaatatagctaaacgccaccacagcgggctcattatcttttgtatttttagtagagatggggtttcaccatgttggccaggctggtctcgaactcctgacctcaggtgatccacccaccttggcctcccaaagtgcggggattacatgcgtgagccaccgcgccggccagagaagccaatctgagtagaaaccggaacaagcaaggttcgaattccctcacctcaatgtgccttaactgaaagcactttctcaaggcagccccatcagagacgctgggctgacacactcaccgtcttggagatattctgggctgctcgaatcttgcgaagtttgatgtagccagggttcttgctcagtgcttctccaaggtgaggagggttaaggtacacgcaagggcaggtctcaatccctggccctgtccttaccacactcccttgctccagtcctcctctgggctgtcagatccaaggttgcgctcaggtggcttgtgcccagccctaccgtggaccccacctgtgggcctccctgcaggctgctgccaggaactaggggcagcaccagaaatgaaggcaaggccaccaatgctattgatctggccttacagtggggagtcatggctcaggtactaccactaagatttcagatctcatctgtagtccccacccccaacaaggagccaagggccagagagcacggagtcgcattcgccttagtctcatcagcctgcccatgaaggagaatggggaactcaggtgccctaggggctgggctgagatctctccagcagaaggatatcatcttggcagcctcggcctcaccctcggcctgcacaattttctgccgctgttcctgctttgctttttctaccaagaattgggcccgctgggcctcctgctgggctgtggtgggagagagtcagggagaccctgtcctgggtcaggagccccacccatggagtctttcctcctcctgcatctcagaagccctcaccccacggctcttgcgactcacccacttgtttggcttctacagcagctgtgtactctcggctaaagctcagctctgtgatggccacatcatccaggatgaggctgaagtccttggccctctctgtcagctcccggcggatcaacagggatacctgagggcaggggtgaagaggggaagggaggggtggtttgaggggactggggagctgaaaggaaggttgcgacccctaacccttcactctcaatacaacatgcactgccttagcttcctgtcaggcaaacctgtaacataagcctctctgctcgaagaggtgcaggaaaagccaagacttggccattttcctctgtgcttcctaacaccgagtgctatcgagttctaatgctggctctccttatttcacagtggcaattagcacagcttttaggtggaaatggcactagggtgacaatgcttttctaataagctgcctttcctaattcccaatactctgggcctaggaaggaaaggctgacaccacgcagatggtggtgggagtcagacctgggcccgctgggtgatcagctgtgaggcattgaacttggccaccacactcttgagcacctcgttgacaatggacggcaacactcgttcctcgtagtccagccctaggcgctggtacatgctaggaagctcctgagcattgggtcgagacaacactcgcagggagatattcaccatctgtaggtctgagattgaggtcagcagtggctggtcaaggccaaacaccctttcccaagcattttctccttcatgttcctccctgtatgccctgtgcaatggtgtacagcctggcactaccctggggggaggagagttaatcaggctgacaaggaagacaagacgcagcacagctgaaatgcaccctcacccactgtgaagccttgaactgcaaaccccgtcaccagcagagctgactactctttccccctctgtactctgtgcaacctctaacgtgggcgctttcgtgctgtaccgtaatcatgtctcctgtaaggacttgggggacaagaattgtgtttaatgaatcttttattcccagggcccagtctagtaaatgaataagcgacctgcactaggtatagcacaaagaagtacattacaggttacaggtgagctacctgacccagggtgtatatgtgtgcgtgggtggggaggaggaagaggtctggggaactcaaaggcacggcttttatgtatggtctagaaggagagaacaggtgaactagtcaagcttagggacaaacttctccagaacagagtgtactagtggatgtaactgtagatatagtaagtcaagcagttagaaaaaaaaggctttaaaacaaagctttgatctaggcagtgaacaagacgagggacaaacaatactcttattgaatacacgtcagggaggagacagtaaaaagcacgcaaacacagtgtgttcagaatttgctgctttgaccccaggaggcaggtatttttgttacagctcttgcagatgtggaaagaggcctaaaggcctgacactaccatattcccctggggtttcttgccagctaccttgatcatcccacctgccatgtgattaccaagtgctcagacctacctttggagcctgtaggggaggagatttttcgaggtctggcccgaatgtcatagataatggggtactggaaccaagggatcctggagaggacagggataggtattaagaggccacagtttcggccgggcgcggtggctcacgcctgtaatcccagcactttgggaggccgaggcgggcggatcatttgaggtcaggagttcgagaccagcttgatctacatagtgaaaccccgtctctactaaaatacaaaaattagccgggcgtggtggcgggcgcctgtaatcccagctactcgtgaggctgaggcaggagaatcgcttgaaatcaggaggcggaggttgcagtgagccgagatcgcgccactgcactccagcctgggcgacagagcaagactccctctccaaaaaaaaaaaaagaaaaggccgcagtttcactagccttgcccggtttcccctcaccacgcgttttttggcctgctcctctccacgaccacagacaaggagagattctcttgtccctctggaaaacaacagtttgtatgctgctggaggttctcgcagcacccactatcctaggggcagggatgaggagggtgggaaaagagcagcgttgaatcctgttgcacgtccgactatagccactgctgggtcggcgtcaagggtgaaaggtcagggtcagcaggctctgcccgccattacctgaagtgaaggccctcggccaggatagtgtcctgctgcactccaccgatccgattgaagaagatggctctgtgcccgccttccactgtggggagatgggtggtgatcaggccaggccgctgctcagaggaaatgctaggcccgtggaggggcgcggggacagggcaaggggtttgggggagggactggaagcgtccggcgagcaggcggaggttgctcaccggtgaacacagattcgcgcacaccgtaggccacggcgccggcccccagcaacagcttcagggccgtgcccatgccccggggcccggcgggcagccgtcccgccaagtccttcaagttctgggccatgtctgatcttgaggccggcggcactggaggtcagaagggggtgccggcccgcctctaccccgctccggcttaggtactgcacccttcacacgagggttcgggcccgtaaggctggcgaaagaaagggcagcggaagtgcgctccctttgaaaccctcccccttagcccactacggacccg

SEQ ID NO: 1137 - DNA, 738 bp, Homo sapiens
ccaaataccattattgattgattgattgactgactgagacaaggcctcactcctgttgcccaggctggtgcagtgatgtgatcatggctcactgcagccttgacttctggggctctggtgcatcctctcacttcagtcccctgagtagctgggactacagacacatgctaccatgcccagctaatgcaaatatcatttttaaaaggcgactgaactggacgcctcatatgagctcccatggctgcccagacatgctttcatgtcagtgattatataattttttttgtaaattagcttatgcaaataatcttgtggaccctaacttatacatgcttctgcaaagaaacatgtttaacgataaagttatactggaattcaaaacatgatgttttatggaatgtaagacattggggtatagataaaaagtggttggaaaaaatatatatatttatttttagagatgaggtctccttctgtcatctaggttggaatgcagtggcatcatcatagttcactgcagtctcaaattcctgggctcaaatgatcctcccaccttggtctcctgaatagctgggactacaggtgcatgccatcatgcctggctaattaaaaacaaaatttatttatttatttttgagacagaatcttgctcttttgcccatgctggagtgtagaggtatgatcttggctcaatgcagcctcaacgtcctgagttgagcggaggaccccgggctccag

SEQ ID NO: 1138 - DNA, 5150 bp, Homo sapiens
gaaggaaatttgtgattagaagccgcgctgttcttatttaagagcgttagcgcaacttccggtattgttgcaagatggccgcgcccagtgatggattcaagcctcgtgaacgaagcggtggggagcaggcacaggactgggatgctctgccacccaagcggccccgactaggggcaggaaacaagatcggaggccgtagtttattgtggtgctggaaggggccagtctggagacagtcaaggtagtttgggacaggaagtggagaagtagtaaatcgataggttgggactccgtggaatgagggtaaggggcccagagtggatgtagaaagcagagaggggtgaaagatgcttttgaaggaaggtggcttggttggctttgcgttgatttgacatcctgggatggtagtactcatttttctttctttttttttttttttttgagacggagtctcgctctgtcgcccaggctggagtgcagttgcgcgacctcggctcactgcaacttctgcctcccgccttcaaacagttctcctgactcagcctctggagtagctgggactacaggcaggtgccaccacgcccggctaatttttttgtatttttagttcagatggggtttcaccatgttggccacgctggtctcgaactcctgacctcaagtgatccgcccgcctcggcctcccaaagtgttgggattagaggcgtgagccactgtgcccggccggtagtactcattttcttttgctctttttgaatgatattctagccctcacctccttgcttccaattggtttaccaggattctgtggtatagtagtctaagcagaggaaagtttcgttccttgcgtcattccacatcccaagacaagttactgggcagatgagaaacgtagttatgtagcctagtctgcccacactttttgtaagggcttcgtgtttcaattcattagtatccatagtcacctctctctaatatccacctatgatacactgtccagacctggttattatttaaaacttttacatctgcatttttatctatcattcatctctttccccacatgtaatagaaccagcagttctctatcttaaagccttgggcagtgttcttcctcctcctttctcttacccgttagaactaattgaataggcccagaagaaatcgcattggtttagaagtcaggccaggattttaatcttcgttctaaatacacttttttttttttttttttttgagatggagtctcagtctctaccaggctggagtgcagtggcacgatcttggctcactgcagcctccgcctcccgggttcaatcgattctcctgcctcagcctccagagtagctgggattacaggcctgcgcctgtaatctattaaaagaatagaaaacatgattatatcctactaatgggttgaaactgtattattcattcaagaaggtttttttcttctataactaagggtgtctcatggacttagttcttggtcatttgttctttgtgctctctgtgacattacttcaactattcaatttcaaaatctacatcccttttttcgcagactttttggagccatatatctcaagaatgttgctagacatatacattccagtgatacataaaaacttaaccttccaaaacttgtatttgtatataacagtttgtttttagactttttactgaccaccctaatgctccttgggactccaaattgcaacttggaattatttcttttagctgctacagatgtagtccacttctttaacatcaaacttctgatgtcttttccagtgtacagagagttgttaggatagtgtctgtcagtcattcccatcctgccctgcttactccagaattatttttggctttgtgcttgatacattaggattctgtggtttacaaagcagcttcatatataatcactgccctttagtgtctcagctcccaattttcctcaaaatttcctttcttcgtttccactttttcttttttgtttcttttttgagatagggtcttgctctgttgcctgggcaacagagtgcagtggtgtgatggttcactgcagcctctacttccctggctcaagcagtcctcccacctcatcctcctgagtaactgggactgccagcaaatggcactgcgcctggctaatttttttttttttttttgtgagacagggtcccaccgtgttgcccaggccggtctcaaattcctgggctcaagtgatccttccacctcggcctcctaaagtgttgggatcacaggcataagccaccacacctggctactttgtcttgattccatctgtacctttgctcatgccagtctttcttttttcttttttttgagacagggtcttgctggagtgcagtggtacagtcttggctcactgcaatctctgtctcctgggctcaagccatcctcccaccttagcctcccaagtagctaggactacaggcatgtgccaccatgcccagctaatttttgtatttttagtagagatggggtttcgccatgttgcccaggctggtcttgaactcctgaccttaagtgatttgcctgccttggcctcccagagtgctgggattacagccgtgagccactgcatctgcccccatgcccgtcttaaaactgggaataacccctcttccttttacttctgagagttttctttgattaaactgcctcctgcatcattagttttcacatttcttttttttgagatggagtctcgctctgttgcccgggctggagtgcagtggcgctgcaagctccgcctcctgggttcatgccattctcctgcctctgcctcccaagtagctgggactacaggcgcctgccaccatgcccggctaattttttatatttttagtagagatggggtttcaccgtgttagccacgatggtctcaatctcctgaccttgtgatctgcccgcctcggcctcccaaagtgctgggattacaggcgtgagccaccacgcccggccttcacatttcttgttcagatttgcagctcttcacttagtgcatgtttggtgtacgcaaactgagggtggtgactcgatattttgcacagtacctacttactgctcctgtaataaacacagcattcagccttgctaactactaactcctgcctagttccaggatgtctcattggccttgcctaacagccacaggttttttaattaaatccagtgtattagtagataatgtgaagtcacaggttgtgcccttcctcctgtttccctctcagaccattcactggggagtgcaaataaggctgcacagtaatcccccgaagggcttgctgggctccacccccagtgttcctggtttagtaggtctagggtgggcctgagaatttgcctaacaagtttccaggtgcagctgctgctggtagtttggggaccacacttgaagaaccacggggctaggtaacagaagcttatgctgttctctcgtcatgttccctgttcttcaggtagggaagacatatgagctactcaactgtgacaagcacaagtctatattgttgaagaatggacgggaccctggggaagcgcggccagatatcacccaccaggtaactccagggacagtgctcacaaccctttgagcctctgtatggaagggttggcagctgagtgctgcctctcttcagccttaaccatgtctcggtttctgctttgctcagagtttgctgatgctgatggatagtcccctgaaccgagctggcttgctacaggtttatatccatacacagaagaatgttctgattgaagtgaatccccagacccgaattcccagaacctttgaccgcttttgtggcctcatgggtaagaagccttagaacaaagttagaatgaacttgtcagtagggaagaagggaggaagaggaaaagggagaactaaatgtggatttttaagcgagaaaatgggagaacaacatgattaataccaggacaaggactgttattatttttctatgtttgtggaaactccactcctgttcttgcagtagcttcctggctgagtgaaagagggagtctgaacccatcactgtacagctagccatatgcttggcaactgtttgttcctaacatttcaggagtccagtctagatataaagcacacagggaactcatcttatccatggggttttccttgttcgatgactggacagaaggactgtggtctccatctagctctgaactcttttttcccccttctagttcaacttttacacaagctcagtgttcgagcagctgatggcccccagaagcttttgaaggtgaggtattgaaacctgttagttgaaggctggttctgggaatgtttctggggctgacttttctctcttttttactttaggtaattaagaatccagtatcagatcactttccagttggatgtatgaaagttggcacttctttttccatcccggttgtcagtgatgtgcgtgagctggtgcccagcagtgatcctattgtttttgtggtaggggcctttgcccatggcaaggtaaggtctgggctcaaccctgaaattcttggtagagctgaacttagtatagaattcccagagcagtaggcattttaacaatgcttacaatgagctagaagacacatgacagttccacaccctgccccagggcacatcctttgagggctgctgccataattggaagtcacagttaggaccttcttcatcctttgtagggatttgatattcaacagcacagctgaaatactagctcagccatagttttcctgccctaaagaagggctgaaacagctactgagtgacagagttggctgacaaaactgttcttttcttaggtcagtgtggagtatacagagaagatggtgtccatcagtaactaccccctttctgctgccctcacctgtgcaaaacttaccacagcctttgaggaagtatggggggtcatttgacagtagtagaacctgttctgaaaccagaaactgttgatgtcacatcctttgaccctggtctgagctgactgctggaagatgatctttctgcactgagactgtggagtttggggaagccaaggctgtacatttgctatttgtttatcctatgaatactgttcttgcaaacctggttgttttggggttcctaa

SEQ ID NO: 1139 - DNA, 352 bp, Homo sapiens
aggcaatataaagctgggtcctaagactaggtttcatttatagcttatgaactattgccagacattttctcttacttgaattttaaaaaatgatacaaggaagctaggcatggtggctcccatgtataatcccagcactctgggaggctgaggcaaggggattgcttgagccgaggagttcgacaccagcctgagcaacatagcgaaaccccgtctctattaaaaaacaagatacaaagatttgagcgtacccatctatgctccagaaacactcatttacactttgtgatctatcttgctagcactgtattatcagattatgaggaaaaatataaattaatatcaggctaaa

SEQ ID NO: 1140 - DNA, 893 bp, Homo sapiens
aagaagaaacagtctcagggaaatttcttttttcttttttttttttaaagagaacaagaaaagtacaacattgcttaagtcctacctcatctttatttttttacagatgaatgtacttatcttttctgcagggattgagcctgtgaagtgataatttctatctacctcataaatctttacatttccttctgcaacaggccctcttcccctcctcagtggagtttgcatttccctcttcccctgcgtggggcatgatatgcacaagcctggcatctgtatggctgggagggcactggatgtgtgtggtggggtgtattctgtagattgagccaaggaaacacaaaaaaaaactactaagtaaaaaaacaaaaaactataaaacatggaaaaaataggatttgaaatgcataattatagaatacctgtgttcttgagaatactgtttatatggggtttagattatgttgtgttgttttgatctttttggaaaatcttctctttttaaatgctgcaacagagaaatttcctctgttctctgtttatacctcagtgtgtttaacatcctcttctgcatcgtttcttgatcttagacgttgtggctgtggcttgctagccaagaaaagcagacccttcatattttagggtatataatctttgtttcttttaagggagggtgtgtgcatgtttgtttcaaagccatcttgcacccaagtagtaaagctgaaaatgacacactgcctcccaaagaacctctccttttcacactttggtttcttaaaaaagtatatagatggtagctcaggatttttgattaaacatattctcaaaagttatgctttcttattttgctgttaggttataaagggttaaatggaaggaaaaaggaaattaac

SEQ ID NO: 1141 - DNA, 278 bp, Homo sapiens
ctggttattcaccccgactgccagtcggcacgctttctgggctcggagggcacaggcaatgggcagttcctgcgcccacaaggggtagctgtggaccaggaagggcgcatcattgtggcggattccaggaaccatcgggtacagatgtttgaatccaacggcagcttcctgtgcaagtttggtgctcaaggcagcggctttgggcagatggaccgcccttccggcatcgccatcacccccgacggaatgatcgttgtggtggactttggcaacaatcg

SEQ ID NO: 1142 - DNA, 472 bp, Homo sapiens
acaagctactctgtctcttcccattgctttaattctagggtttctgagtgaccaaaatgggaaggaaaaaaaaaacctcatctcacagaggagaactgcatgcaataaaagattcaaaagttggaaagtagcttcaaactgctgctggctcccagctgctgttacagggtgggaaggtgttaggaaatgttgtttgttagaagctccttttactgtagaatttaatagtgaatccttccccaatgcctattcagttgccttttggccgttaagctctaagttctttggtaaagagttaatataattaaacatttttactgttttctattttggagtaacttggtgctgatcttccttccctttccccagctgcccaacaagccaccctttaaacaccaaagacaactggttttaaatgcttgaaaaaaattttattgaggagatggatcttgattaaaatcttttcatcatc

SEQ ID NO: 1143 - DNA, 756 bp, Homo sapiens
ctaatgctaatcttatcaagtgagaaaaaacccaaccagcatatgagtttttactgttttggaaagagttctctgttccttaaggagataattataatgaaaccatttatagttttatcatgctttacttccagaaaatgctttatactggtgacagtctgactcggccattctatgtgcctcaaaacagagtgcaggcggggcacggtggctcacacctgtaatcccagcactttgtgaggccaaggtgggcagatcacttgaggtcaggagttcaagaccagcctggccaacatggtgaaacactgtctctactaaaaatacaaaaattagctgggtgtgttggcgggcgcctgtaattccagctactcgggaggctgaggcaggagaattgcctgaacccaagaggtggaggttgcagtgagccaagattgagtgaaactccatctgaaaaaaaaagaaagactaaaataatagggcttagtctaccctaacttattctcatcttttaggagatttttgcagaactttaacaattatcagtatccctgacctcaatttgatgctgaaaagtatgctaggtagtagtaattttgaaagctatttgcttttttgtttggttgtaactcaaattagtaaaaatgaacatgggtttgccccggggggcagaggtttcagtgagccgtgatcgtgccactgcactccagcctgggtgacagagagagactctgtctaaaaaaaaaaaaaaaaaaaaaa

SEQ ID NO: 1144 - DNA, 767 bp, Homo sapiens
ctaatgctaatcttatcaagtgagaaaaaacccaaccagcatatgagtttttactgttttggaaagagttctctgttccttaaggagataattataatgaaaccatttatagttttatcatgctttacttccagaaaatgctttatactggtgacagtctgactcggccattctatgtgcctcaaaacagagtgcaggcggggcacggtggctcacacctgtaatcccagcactttgtgaggccaaggtgggcagatcacttgaggtcaggagttcaagaccagcctggccaacatggtgaaacactgtctctactaaaaatacaaaaattagctgggtgtgttggcgggcgcctgtaattccagctactcgggaggctgaggcaggagaattgcctgaacccaagaggtggaggttgcagtgagccaagattgagtgaaactccatctgaaaaaaaaagaaagactaaaataatagggcttagtctaccctaacttattctcatcttttaggagatttttgcagaactttaacaattatcagtatccctgacctcaatttgatgctgaaaagtatgctaggtagtagtaattttgaaagctatttgcttttttgtttggttgtaactcaaattagtaaaaatgaacatgggtttgccccggggggcagaggtttcagtgagccgtgatcgtgccactgcactccagcctgggtgacagagagagactctgtctaaaaaaaaaaaaaaaaaaaaaaaaggtgggttt

SEQ ID NO: 1145 - DNA, 4167 bp, Homo sapiens
  SITE (2901): n equals a,t,g, or c
  SITE (2902): n equals a,t,g, or c
  SITE (2903): n equals a,t,g, or c
  SITE (2904): n equals a,t,g, or c
  SITE (2905): n equals a,t,g, or c
  SITE (2906): n equals a,t,g, or c
  SITE (2907): n equals a,t,g, or c
  SITE (2908): n equals a,t,g, or c
  SITE (2909): n equals a,t,g, or c
  SITE (2910): n equals a,t,g, or c
  SITE (2911): n equals a,t,g, or c
  SITE (2912): n equals a,t,g, or c
  SITE (2913): n equals a,t,g, or c
  SITE (2914): n equals a,t,g, or c
  SITE (2915): n equals a,t,g, or c
  SITE (2916): n equals a,t,g, or c
  SITE (2917): n equals a,t,g, or c
  SITE (2918): n equals a,t,g, or c
  SITE (2919): n equals a,t,g, or c
  SITE (2920): n equals a,t,g, or c
  SITE (2921): n equals a,t,g, or c
  SITE (2922): n equals a,t,g, or c
  SITE (2923): n equals a,t,g, or c
  SITE (2924): n equals a,t,g, or c
  SITE (2925): n equals a,t,g, or c
  SITE (2926): n equals a,t,g, or c
  SITE (2927): n equals a,t,g, or c
  SITE (2928): n equals a,t,g, or c
  SITE (2929): n equals a,t,g, or c
  SITE (2930): n equals a,t,g, or c
  SITE (2931): n equals a,t,g, or c
  SITE (2932): n equals a,t,g, or c
  SITE (2933): n equals a,t,g, or c
  SITE (2934): n equals a,t,g, or c
  SITE (2935): n equals a,t,g, or c
  SITE (2936): n equals a,t,g, or c
  SITE (2937): n equals a,t,g, or c
  SITE (2938): n equals a,t,g, or c
  SITE (2939): n equals a,t,g, or c
  SITE (2940): n equals a,t,g, or c
  SITE (2941): n equals a,t,g, or c
  SITE (2942): n equals a,t,g, or c
  SITE (2943): n equals a,t,g, or c
  SITE (2944): n equals a,t,g, or c
  SITE (2945): n equals a,t,g, or c
  SITE (2946): n equals a,t,g, or c
  SITE (2947): n equals a,t,g, or c
  SITE (2948): n equals a,t,g, or c
  SITE (2949): n equals a,t,g, or c
  SITE (2950): n equals a,t,g, or c
  SITE (2951): n equals a,t,g, or c
  SITE (2952): n equals a,t,g, or c
  SITE (2953): n equals a,t,g, or c
  SITE (2954): n equals a,t,g, or c
  SITE (2955): n equals a,t,g, or c
  SITE (2956): n equals a,t,g, or c
  SITE (2957): n equals a,t,g, or c
  SITE (2958): n equals a,t,g, or c
  SITE (2959): n equals a,t,g, or c
  SITE (2960): n equals a,t,g, or c
  SITE (2961): n equals a,t,g, or c
  SITE (2962): n equals a,t,g, or c
  SITE (2963): n equals a,t,g, or c
  SITE (2964): n equals a,t,g, or c
  SITE (2965): n equals a,t,g, or c
  SITE (2966): n equals a,t,g, or c
  SITE (2967): n equals a,t,g, or c
  SITE (2968): n equals a,t,g, or c
  SITE (2969): n equals a,t,g, or c
  SITE (2970): n equals a,t,g, or c
  SITE (2971): n equals a,t,g, or c
  SITE (2972): n equals a,t,g, or c
  SITE (2973): n equals a,t,g, or c
  SITE (2974): n equals a,t,g, or c
  SITE (2975): n equals a,t,g, or c
  SITE (2976): n equals a,t,g, or c
  SITE (2977): n equals a,t,g, or c
  SITE (2978): n equals a,t,g, or c
  SITE (2979): n equals a,t,g, or c
  SITE (2980): n equals a,t,g, or c
  SITE (2981): n equals a,t,g, or c
  SITE (2982): n equals a,t,g, or c
  SITE (2983): n equals a,t,g, or c
  SITE (2984): n equals a,t,g, or c
  SITE (2985): n equals a,t,g, or c
  SITE (2986): n equals a,t,g, or c
  SITE (2987): n equals a,t,g, or c
  SITE (2988): n equals a,t,g, or c
  SITE (2989): n equals a,t,g, or c
  SITE (2990): n equals a,t,g, or c
  SITE (2991): n equals a,t,g, or c
  SITE (2992): n equals a,t,g, or c
  SITE (2993): n equals a,t,g, or c
  SITE (2994): n equals a,t,g, or c
  SITE (2995): n equals a,t,g, or c
  SITE (2996): n equals a,t,g, or c
  SITE (2997): n equals a,t,g, or c
  SITE (2998): n equals a,t,g, or c
  SITE (2999): n equals a,t,g, or c
  SITE (3000): n equals a,t,g, or c
  SITE (3001): n equals a,t,g, or c
  SITE (3002): n equals a,t,g, or c
  SITE (3003): n equals a,t,g, or c
  SITE (3004): n equals a,t,g, or c
  SITE (3005): n equals a,t,g, or c
  SITE (3006): n equals a,t,g, or c
  SITE (3007): n equals a,t,g, or c
  SITE (3008): n equals a,t,g, or c
  SITE (3009): n equals a,t,g, or c
  SITE (3010): n equals a,t,g, or c
  SITE (3011): n equals a,t,g, or c
  SITE (3012): n equals a,t,g, or c
  SITE (3013): n equals a,t,g, or c
  SITE (3014): n equals a,t,g, or c
  SITE (3015): n equals a,t,g, or c
  SITE (3016): n equals a,t,g, or c
  SITE (3017): n equals a,t,g, or c
  SITE (3018): n equals a,t,g, or c
  SITE (3019): n equals a,t,g, or c
  SITE (3020): n equals a,t,g, or c
  SITE (3021): n equals a,t,g, or c
  SITE (3022): n equals a,t,g, or c
  SITE (3023): n equals a,t,g, or c
  SITE (3024): n equals a,t,g, or c
  SITE (3025): n equals a,t,g, or c
  SITE (3026): n equals a,t,g, or c
  SITE (3027): n equals a,t,g, or c
  SITE (3028): n equals a,t,g, or c
  SITE (3029): n equals a,t,g, or c
  SITE (3030): n equals a,t,g, or c
  SITE (3031): n equals a,t,g, or c
  SITE (3032): n equals a,t,g, or c
  SITE (3033): n equals a,t,g, or c
  SITE (3034): n equals a,t,g, or c
  SITE (3035): n equals a,t,g, or c
  SITE (3036): n equals a,t,g, or c
  SITE (3037): n equals a,t,g, or c
  SITE (3038): n equals a,t,g, or c
  SITE (3039): n equals a,t,g, or c
  SITE (3040): n equals a,t,g, or c
  SITE (3041): n equals a,t,g, or c
  SITE (3042): n equals a,t,g, or c
  SITE (3043): n equals a,t,g, or c
  SITE (3044): n equals a,t,g, or c
  SITE (3045): n equals a,t,g, or c
  SITE (3046): n equals a,t,g, or c
  SITE (3047): n equals a,t,g, or c
  SITE (3048): n equals a,t,g, or c
  SITE (3049): n equals a,t,g, or c
  SITE (3050): n equals a,t,g, or c
  SITE (3051): n equals a,t,g, or c
  SITE (3052): n equals a,t,g, or c
  SITE (3053): n equals a,t,g, or c
  SITE (3054): n equals a,t,g, or c
  SITE (3055): n equals a,t,g, or c
  SITE (3056): n equals a,t,g, or c
  SITE (3057): n equals a,t,g, or c
  SITE (3058): n equals a,t,g, or c
  SITE (3059): n equals a,t,g, or c
  SITE (3060): n equals a,t,g, or c
  SITE (3061): n equals a,t,g, or c
  SITE (3062): n equals a,t,g, or c
  SITE (3063): n equals a,t,g, or c
  SITE (3064): n equals a,t,g, or c
  SITE (3065): n equals a,t,g, or c
  SITE (3066): n equals a,t,g, or c
  SITE (3067): n equals a,t,g, or c
  SITE (3068): n equals a,t,g, or c
  SITE (3069): n equals a,t,g, or c
  SITE (3070): n equals a,t,g, or c
  SITE (3071): n equals a,t,g, or c
  SITE (3072): n equals a,t,g, or c
  SITE (3073): n equals a,t,g, or c
  SITE (3074): n equals a,t,g, or c
  SITE (3075): n equals a,t,g, or c
  SITE (3076): n equals a,t,g, or c
  SITE (3077): n equals a,t,g, or c
  SITE (3078): n equals a,t,g, or c
  SITE (3079): n equals a,t,g, or c
  SITE (3080): n equals a,t,g, or c
  SITE (3081): n equals a,t,g, or c
  SITE (3082): n equals a,t,g, or c
  SITE (3083): n equals a,t,g, or c
  SITE (3084): n equals a,t,g, or c
  SITE (3085): n equals a,t,g, or c
  SITE (3086): n equals a,t,g, or c
  SITE (3087): n equals a,t,g, or c
  SITE (3088): n equals a,t,g, or c
  SITE (3089): n equals a,t,g, or c
  SITE (3090): n equals a,t,g, or c
  SITE (3091): n equals a,t,g, or c
  SITE (3092): n equals a,t,g, or c
  SITE (3093): n equals a,t,g, or c
  SITE (3094): n equals a,t,g, or c
  SITE (3095): n equals a,t,g, or c
  SITE (3096): n equals a,t,g, or c
  SITE (3097): n equals a,t,g, or c
  SITE (3098): n equals a,t,g, or c
  SITE (3099): n equals a,t,g, or c
  SITE (3100): n equals a,t,g, or c
  SITE (3101): n equals a,t,g, or c
  SITE (3102): n equals a,t,g, or c
  SITE (3103): n equals a,t,g, or c
  SITE (3104): n equals a,t,g, or c
  SITE (3105): n equals a,t,g, or c
  SITE (3106): n equals a,t,g, or c
  SITE (3107): n equals a,t,g, or c
  SITE (3108): n equals a,t,g, or c
  SITE (3109): n equals a,t,g, or c
  SITE (3110): n equals a,t,g, or c
  SITE (3111): n equals a,t,g, or c
  SITE (3112): n equals a,t,g, or c
  SITE (3113): n equals a,t,g, or c
  SITE (3114): n equals a,t,g, or c
  SITE (3115): n equals a,t,g, or c
  SITE (3116): n equals a,t,g, or c
  SITE (3117): n equals a,t,g, or c
  SITE (3118): n equals a,t,g, or c
  SITE (3119): n equals a,t,g, or c
  SITE (3120): n equals a,t,g, or c
  SITE (3121): n equals a,t,g, or c
  SITE (3122): n equals a,t,g, or c
  SITE (3123): n equals a,t,g, or c
  SITE (3124): n equals a,t,g, or c
  SITE (3125): n equals a,t,g, or c
  SITE (3126): n equals a,t,g, or c
  SITE (3127): n equals a,t,g, or c
  SITE (3128): n equals a,t,g, or c
  SITE (3129): n equals a,t,g, or c
  SITE (3130): n equals a,t,g, or c
  SITE (3131): n equals a,t,g, or c
  SITE (3132): n equals a,t,g, or c
  SITE (3133): n equals a,t,g, or c
  SITE (3134): n equals a,t,g, or c
  SITE (3135): n equals a,t,g, or c
  SITE (3136): n equals a,t,g, or c
  SITE (3137): n equals a,t,g, or c
  SITE (3138): n equals a,t,g, or c
  SITE (3139): n equals a,t,g, or c
  SITE (3140): n equals a,t,g, or c
  SITE (3141): n equals a,t,g, or c
  SITE (3142): n equals a,t,g, or c
  SITE (3143): n equals a,t,g, or c
  SITE (3144): n equals a,t,g, or c
  SITE (3145): n equals a,t,g, or c
  SITE (3146): n equals a,t,g, or c
  SITE (3147): n equals a,t,g, or c
  SITE (3148): n equals a,t,g, or c
  SITE (3149): n equals a,t,g, or c
  SITE (3150): n equals a,t,g, or c
  SITE (3151): n equals a,t,g, or c
  SITE (3152): n equals a,t,g, or c
  SITE (3153): n equals a,t,g, or c
  SITE (3154): n equals a,t,g, or c
  SITE (3155): n equals a,t,g, or c
  SITE (3156): n equals a,t,g, or c
  SITE (3157): n equals a,t,g, or c
  SITE (3158): n equals a,t,g, or c
  SITE (3159): n equals a,t,g, or c
  SITE (3160): n equals a,t,g, or c
  SITE (3161): n equals a,t,g, or c
  SITE (3162): n equals a,t,g, or c
  SITE (3163): n equals a,t,g, or c
  SITE (3164): n equals a,t,g, or c
  SITE (3165): n equals a,t,g, or c
  SITE (3166): n equals a,t,g, or c
  SITE (3167): n equals a,t,g, or c
  SITE (3168): n equals a,t,g, or c
  SITE (3169): n equals a,t,g, or c
  SITE (3170): n equals a,t,g, or c
  SITE (3171): n equals a,t,g, or c
  SITE (3172): n equals a,t,g, or c
  SITE (3173): n equals a,t,g, or c
  SITE (3174): n equals a,t,g, or c
  SITE (3175): n equals a,t,g, or c
  SITE (3176): n equals a,t,g, or c
  SITE (3177): n equals a,t,g, or c
  SITE (3178): n equals a,t,g, or c
  SITE (3179): n equals a,t,g, or c
  SITE (3180): n equals a,t,g, or c
  SITE (3181): n equals a,t,g, or c
  SITE (3182): n equals a,t,g, or c
  SITE (3183): n equals a,t,g, or c
  SITE (3184): n equals a,t,g, or c
  SITE (3185): n equals a,t,g, or c
  SITE (3186): n equals a,t,g, or c
  SITE (3187): n equals a,t,g, or c
  SITE (3188): n equals a,t,g, or c
  SITE (3189): n equals a,t,g, or c
  SITE (3190): n equals a,t,g, or c
  SITE (3191): n equals a,t,g, or c
  SITE (3192): n equals a,t,g, or c
  SITE (3193): n equals a,t,g, or c
  SITE (3194): n equals a,t,g, or c
  SITE (3195): n equals a,t,g, or c
  SITE (3196): n equals a,t,g, or c
  SITE (3197): n equals a,t,g, or c
  SITE (3198): n equals a,t,g, or c
  SITE (3199): n equals a,t,g, or c
  SITE (3200): n equals a,t,g, or c
  SITE (3201): n equals a,t,g, or c
  SITE (3202): n equals a,t,g, or c
  SITE (3203): n equals a,t,g, or c
  SITE (3204): n equals a,t,g, or c
  SITE (3205): n equals a,t,g, or c
  SITE (3206): n equals a,t,g, or c
  SITE (3207): n equals a,t,g, or c
  SITE (3208): n equals a,t,g, or c
  SITE (3209): n equals a,t,g, or c
  SITE (3210): n equals a,t,g, or c
  SITE (3211): n equals a,t,g, or c
  SITE (3212): n equals a,t,g, or c
  SITE (3213): n equals a,t,g, or c
  SITE (3214): n equals a,t,g, or c
  SITE (3215): n equals a,t,g, or c
  SITE (3216): n equals a,t,g, or c
  SITE (3217): n equals a,t,g, or c
  SITE (3218): n equals a,t,g, or c
  SITE (3219): n equals a,t,g, or c
  SITE (3220): n equals a,t,g, or c
  SITE (3221): n equals a,t,g, or c
  SITE (3222): n equals a,t,g, or c
  SITE (3223): n equals a,t,g, or c
  SITE (3224): n equals a,t,g, or c
  SITE (3225): n equals a,t,g, or c
  SITE (3226): n equals a,t,g, or c
  SITE (3227): n equals a,t,g, or c
  SITE (3228): n equals a,t,g, or c
  SITE (3229): n equals a,t,g, or c
  SITE (3230): n equals a,t,g, or c
  SITE (3231): n equals a,t,g, or c
  SITE (3232): n equals a,t,g, or c
  SITE (3233): n equals a,t,g, or c
  SITE (3234): n equals a,t,g, or c
  SITE (3235): n equals a,t,g, or c
  SITE (3236): n equals a,t,g, or c
  SITE (3237): n equals a,t,g, or c
  SITE (3238): n equals a,t,g, or c
  SITE (3239): n equals a,t,g, or c
  SITE (3240): n equals a,t,g, or c
  SITE (3241): n equals a,t,g, or c
  SITE (3242): n equals a,t,g, or c
  SITE (3243): n equals a,t,g, or c
  SITE (3244): n equals a,t,g, or c
  SITE (3245): n equals a,t,g, or c
  SITE (3246): n equals a,t,g, or c
  SITE (3247): n equals a,t,g, or c
  SITE (3248): n equals a,t,g, or c
  SITE (3249): n equals a,t,g, or c
  SITE (3250): n equals a,t,g, or c
  SITE (3251): n equals a,t,g, or c
  SITE (3252): n equals a,t,g, or c
  SITE (3253): n equals a,t,g, or c
  SITE (3254): n equals a,t,g, or c
  SITE (3255): n equals a,t,g, or c
  SITE (3256): n equals a,t,g, or c
  SITE (3257): n equals a,t,g, or c
  SITE (3258): n equals a,t,g, or c
  SITE (3259): n equals a,t,g, or c
  SITE (3260): n equals a,t,g, or c
  SITE (3261): n equals a,t,g, or c
  SITE (3262): n equals a,t,g, or c
  SITE (3263): n equals a,t,g, or c
  SITE (3264): n equals a,t,g, or c
  SITE (3265): n equals a,t,g, or c
  SITE (3266): n equals a,t,g, or c
  SITE (3267): n equals a,t,g, or c
  SITE (3268): n equals a,t,g, or c
  SITE (3269): n equals a,t,g, or c
  SITE (3270): n equals a,t,g, or c
  SITE (3271): n equals a,t,g, or c
  SITE (3272): n equals a,t,g, or c
  SITE (3273): n equals a,t,g, or c
  SITE (3274): n equals a,t,g, or c
  SITE (3275): n equals a,t,g, or c
  SITE (3276): n equals a,t,g, or c
  SITE (3277): n equals a,t,g, or c
  SITE (3278): n equals a,t,g, or c
  SITE (3279): n equals a,t,g, or c
  SITE (3280): n equals a,t,g, or c
  SITE (3281): n equals a,t,g, or c
  SITE (3282): n equals a,t,g, or c
  SITE (3283): n equals a,t,g, or c
  SITE (3284): n equals a,t,g, or c
  SITE (3285): n equals a,t,g, or c
  SITE (3286): n equals a,t,g, or c
  SITE (3287): n equals a,t,g, or c
  SITE (3288): n equals a,t,g, or c
  SITE (3289): n equals a,t,g, or c
  SITE (3290): n equals a,t,g, or c
  SITE (3291): n equals a,t,g, or c
  SITE (3292): n equals a,t,g, or c
  SITE (3293): n equals a,t,g, or c
  SITE (3294): n equals a,t,g, or c
  SITE (3295): n equals a,t,g, or c
  SITE (3296): n equals a,t,g, or c
  SITE (3297): n equals a,t,g, or c
  SITE (3298): n equals a,t,g, or c
  SITE (3299): n equals a,t,g, or c
  SITE (3300): n equals a,t,g, or c
  SITE (3301): n equals a,t,g, or c
  SITE (3302): n equals a,t,g, or c
  SITE (3303): n equals a,t,g, or c
  SITE (3304): n equals a,t,g, or c
  SITE (3305): n equals a,t,g, or c
  SITE (3306): n equals a,t,g, or c
  SITE (3307): n equals a,t,g, or c
  SITE (3308): n equals a,t,g, or c
  SITE (3309): n equals a,t,g, or c
  SITE (3310): n equals a,t,g, or c
  SITE (3311): n equals a,t,g, or c
  SITE (3312): n equals a,t,g, or c
  SITE (3313): n equals a,t,g, or c
  SITE (3314): n equals a,t,g, or c
  SITE (3315): n equals a,t,g, or c
  SITE (3316): n equals a,t,g, or c
  SITE (3317): n equals a,t,g, or c
  SITE (3318): n equals a,t,g, or c
  SITE (3319): n equals a,t,g, or c
  SITE (3320): n equals a,t,g, or c
  SITE (3321): n equals a,t,g, or c
  SITE (3322): n equals a,t,g, or c
  SITE (3323): n equals a,t,g, or c
  SITE (3324): n equals a,t,g, or c
  SITE (3325): n equals a,t,g, or c
  SITE (3326): n equals a,t,g, or c
  SITE (3327): n equals a,t,g, or c
  SITE (3328): n equals a,t,g, or c
  SITE (3329): n equals a,t,g, or c
  SITE (3330): n equals a,t,g, or c
  SITE (3331): n equals a,t,g, or c
  SITE (3332): n equals a,t,g, or c
  SITE (3333): n equals a,t,g, or c
  SITE (3334): n equals a,t,g, or c
  SITE (3335): n equals a,t,g, or c
  SITE (3336): n equals a,t,g, or c
  SITE (3337): n equals a,t,g, or c
  SITE (3338): n equals a,t,g, or c
  SITE (3339): n equals a,t,g, or c
  SITE (3340): n equals a,t,g, or c
  SITE (3341): n equals a,t,g, or c
  SITE (3342): n equals a,t,g, or c
  SITE (3343): n equals a,t,g, or c
  SITE (3344): n equals a,t,g, or c
  SITE (3345): n equals a,t,g, or c
  SITE (3346): n equals a,t,g, or c
  SITE (3347): n equals a,t,g, or c
  SITE (3348): n equals a,t,g, or c
  SITE (3349): n equals a,t,g, or c
  SITE (3350): n equals a,t,g, or c
  SITE (3351): n equals a,t,g, or c
  SITE (3352): n equals a,t,g, or c
  SITE (3353): n equals a,t,g, or c
  SITE (3354): n equals a,t,g, or c
  SITE (3355): n equals a,t,g, or c
  SITE (3356): n equals a,t,g, or c
  SITE (3357): n equals a,t,g, or c
  SITE (3358): n equals a,t,g, or c
  SITE (3359): n equals a,t,g, or c
  SITE (3360): n equals a,t,g, or c
  SITE (3361): n equals a,t,g, or c
  SITE (3362): n equals a,t,g, or c
  SITE (3363): n equals a,t,g, or c
  SITE (3364): n equals a,t,g, or c
  SITE (3365): n equals a,t,g, or c
  SITE (3366): n equals a,t,g, or c
  SITE (3367): n equals a,t,g, or c
  SITE (3368): n equals a,t,g, or c
  SITE (3369): n equals a,t,g, or c
  SITE (3370): n equals a,t,g, or c
  SITE (3371): n equals a,t,g, or c
  SITE (3372): n equals a,t,g, or c
  SITE (3373): n equals a,t,g, or c
  SITE (3374): n equals a,t,g, or c
  SITE (3375): n equals a,t,g, or c
  SITE (3376): n equals a,t,g, or c
  SITE (3377): n equals a,t,g, or c
  SITE (3378): n equals a,t,g, or c
  SITE (3379): n equals a,t,g, or c
  SITE (3380): n equals a,t,g, or c
  SITE (3381): n equals a,t,g, or c
  SITE (3382): n equals a,t,g, or c
  SITE (3383): n equals a,t,g, or c
  SITE (3384): n equals a,t,g, or c
  SITE (3385): n equals a,t,g, or c
  SITE (3386): n equals a,t,g, or c
  SITE (3387): n equals a,t,g, or c
  SITE (3388): n equals a,t,g, or c
  SITE (3389): n equals a,t,g, or c
  SITE (3390): n equals a,t,g, or c
  SITE (3391): n equals a,t,g, or c
  SITE (3392): n equals a,t,g, or c
  SITE (3393): n equals a,t,g, or c
  SITE (3394): n equals a,t,g, or c
  SITE (3395): n equals a,t,g, or c
  SITE (3396): n equals a,t,g, or c
  SITE (3397): n equals a,t,g, or c
  SITE (3398): n equals a,t,g, or c
  SITE (3399): n equals a,t,g, or c
  SITE (3400): n equals a,t,g, or c
  SITE (3401): n equals a,t,g, or c
  SITE (3402): n equals a,t,g, or c
  SITE (3403): n equals a,t,g, or c
  SITE (3404): n equals a,t,g, or c
  SITE (3405): n equals a,t,g, or c
  SITE (3406): n equals a,t,g, or c
  SITE (3407): n equals a,t,g, or c
  SITE (3408): n equals a,t,g, or c
  SITE (3409): n equals a,t,g, or c
  SITE (3410): n equals a,t,g, or c
  SITE (3411): n equals a,t,g, or c
  SITE (3412): n equals a,t,g, or c
  SITE (3413): n equals a,t,g, or c
  SITE (3414): n equals a,t,g, or c
  SITE (3415): n equals a,t,g, or c
  SITE (3416): n equals a,t,g, or c
  SITE (3417): n equals a,t,g, or c
  SITE (3418): n equals a,t,g, or c
  SITE (3419): n equals a,t,g, or c
  SITE (3420): n equals a,t,g, or c
  SITE (3421): n equals a,t,g, or c
  SITE (3422): n equals a,t,g, or c
  SITE (3423): n equals a,t,g, or c
  SITE (3424): n equals a,t,g, or c
  SITE (3425): n equals a,t,g, or c
  SITE (3426): n equals a,t,g, or c
  SITE (3427): n equals a,t,g, or c
  SITE (3428): n equals a,t,g, or c
  SITE (3429): n equals a,t,g, or c
  SITE (3430): n equals a,t,g, or c
  SITE (3431): n equals a,t,g, or c
  SITE (3432): n equals a,t,g, or c
  SITE (3433): n equals a,t,g, or c
  SITE (3434): n equals a,t,g, or c
  SITE (3435): n equals a,t,g, or c
  SITE (3436): n equals a,t,g, or c
  SITE (3437): n equals a,t,g, or c
  SITE (3438): n equals a,t,g, or c
  SITE (3439): n equals a,t,g, or c
  SITE (3440): n equals a,t,g, or c
  SITE (3441): n equals a,t,g, or c
  SITE (3442): n equals a,t,g, or c
  SITE (3443): n equals a,t,g, or c
  SITE (3444): n equals a,t,g, or c
  SITE (3445): n equals a,t,g, or c
  SITE (3446): n equals a,t,g, or c
  SITE (3447): n equals a,t,g, or c
  SITE (3448): n equals a,t,g, or c
  SITE (3449): n equals a,t,g, or c
  SITE (3450): n equals a,t,g, or c
  SITE (3451): n equals a,t,g, or c
  SITE (3452): n equals a,t,g, or c
  SITE (3453): n equals a,t,g, or c
  SITE (3454): n equals a,t,g, or c
  SITE (3455): n equals a,t,g, or c
  SITE (3456): n equals a,t,g, or c
  SITE (3457): n equals a,t,g, or c
  SITE (3458): n equals a,t,g, or c
  SITE (3459): n equals a,t,g, or c
  SITE (3460): n equals a,t,g, or c
  SITE (3461): n equals a,t,g, or c
  SITE (3462): n equals a,t,g, or c
  SITE (3463): n equals a,t,g, or c
  SITE (3464): n equals a,t,g, or c
  SITE (3465): n equals a,t,g, or c
  SITE (3466): n equals a,t,g, or c
  SITE (3467): n equals a,t,g, or c
  SITE (3468): n equals a,t,g, or c
  SITE (3469): n equals a,t,g, or c
  SITE (3470): n equals a,t,g, or c
  SITE (3471): n equals a,t,g, or c
  SITE (3472): n equals a,t,g, or c
  SITE (3473): n equals a,t,g, or c
  SITE (3474): n equals a,t,g, or c
  SITE (3475): n equals a,t,g, or c
  SITE (3476): n equals a,t,g, or c
  SITE (3477): n equals a,t,g, or c
  SITE (3478): n equals a,t,g, or c
  SITE (3479): n equals a,t,g, or c
  SITE (3480): n equals a,t,g, or c
  SITE (3481): n equals a,t,g, or c
  SITE (3482): n equals a,t,g, or c
  SITE (3483): n equals a,t,g, or c
  SITE (3484): n equals a,t,g, or c
  SITE (3485): n equals a,t,g, or c
  SITE (3486): n equals a,t,g, or c
  SITE (3487): n equals a,t,g, or c
  SITE (3488): n equals a,t,g, or c
  SITE (3489): n equals a,t,g, or c
  SITE (3490): n equals a,t,g, or c
  SITE (3491): n equals a,t,g, or c
  SITE (3492): n equals a,t,g, or c
  SITE (3493): n equals a,t,g, or c
  SITE (3494): n equals a,t,g, or c
  SITE (3495): n equals a,t,g, or c
  SITE (3496): n equals a,t,g, or c
  SITE (3497): n equals a,t,g, or c
  SITE (3498): n equals a,t,g, or c
  SITE (3499): n equals a,t,g, or c
  SITE (3500): n equals a,t,g, or c
  SITE (3501): n equals a,t,g, or c
  SITE (3502): n equals a,t,g, or c
  SITE (3503): n equals a,t,g, or c
  SITE (3504): n equals a,t,g, or c
  SITE (3505): n equals a,t,g, or c
  SITE (3506): n equals a,t,g, or c
  SITE (3507): n equals a,t,g, or c
  SITE (3508): n equals a,t,g, or c
  SITE (3509): n equals a,t,g, or c
  SITE (3510): n equals a,t,g, or c
  SITE (3511): n equals a,t,g, or c
  SITE (3512): n equals a,t,g, or c
  SITE (3513): n equals a,t,g, or c
  SITE (3514): n equals a,t,g, or c
  SITE (3515): n equals a,t,g, or c
  SITE (3516): n equals a,t,g, or c
  SITE (3517): n equals a,t,g, or c
  SITE (3518): n equals a,t,g, or c
  SITE (3519): n equals a,t,g, or c
  SITE (3520): n equals a,t,g, or c
  SITE (3521): n equals a,t,g, or c
  SITE (3522): n equals a,t,g, or c
  SITE (3523): n equals a,t,g, or c
  SITE (3524): n equals a,t,g, or c
  SITE (3525): n equals a,t,g, or c
  SITE (3526): n equals a,t,g, or c
  SITE (3527): n equals a,t,g, or c
  SITE (3528): n equals a,t,g, or c
  SITE (3529): n equals a,t,g, or c
  SITE (3530): n equals a,t,g, or c
  SITE (3531): n equals a,t,g, or c
  SITE (3532): n equals a,t,g, or c
  SITE (3533): n equals a,t,g, or c
  SITE (3534): n equals a,t,g, or c
  SITE (3535): n equals a,t,g, or c
  SITE (3536): n equals a,t,g, or c
  SITE (3537): n equals a,t,g, or c
  SITE (3538): n equals a,t,g, or c
  SITE (3539): n equals a,t,g, or c
  SITE (3540): n equals a,t,g, or c
  SITE (3541): n equals a,t,g, or c
  SITE (3542): n equals a,t,g, or c
  SITE (3543): n equals a,t,g, or c
  SITE (3544): n equals a,t,g, or c
  SITE (3545): n equals a,t,g, or c
  SITE (3546): n equals a,t,g, or c
  SITE (3547): n equals a,t,g, or c
  SITE (3548): n equals a,t,g, or c
  SITE (3549): n equals a,t,g, or c
  SITE (3550): n equals a,t,g, or c
  SITE (3551): n equals a,t,g, or c
  SITE (3552): n equals a,t,g, or c
  SITE (3553): n equals a,t,g, or c
  SITE (3554): n equals a,t,g, or c
  SITE (3555): n equals a,t,g, or c
  SITE (3556): n equals a,t,g, or c
  SITE (3557): n equals a,t,g, or c
  SITE (3558): n equals a,t,g, or c
  SITE (3559): n equals a,t,g, or c
  SITE (3560): n equals a,t,g, or c
  SITE (3561): n equals a,t,g, or c
  SITE (3562): n equals a,t,g, or c
  SITE (3563): n equals a,t,g, or c
  SITE (3564): n equals a,t,g, or c
  SITE (3565): n equals a,t,g, or c
  SITE (3566): n equals a,t,g, or c
  SITE (3567): n equals a,t,g, or c
  SITE (3568): n equals a,t,g, or c
  SITE (3569): n equals a,t,g, or c
  SITE (3570): n equals a,t,g, or c
  SITE (3571): n equals a,t,g, or c
  SITE (3572): n equals a,t,g, or c
  SITE (3573): n equals a,t,g, or c
  SITE (3574): n equals a,t,g, or c
  SITE (3575): n equals a,t,g, or c
  SITE (3576): n equals a,t,g, or c
  SITE (3577): n equals a,t,g, or c
  SITE (3578): n equals a,t,g, or c
  SITE (3579): n equals a,t,g, or c
  SITE (3580): n equals a,t,g, or c
  SITE (3581): n equals a,t,g, or c
  SITE (3582): n equals a,t,g, or c
  SITE (3583): n equals a,t,g, or c
  SITE (3584): n equals a,t,g, or c
  SITE (3585): n equals a,t,g, or c
  SITE (3586): n equals a,t,g, or c
  SITE (3587): n equals a,t,g, or c
  SITE (3588): n equals a,t,g, or c
  SITE (3589): n equals a,t,g, or c
  SITE (3590): n equals a,t,g, or c
  SITE (3591): n equals a,t,g, or c
  SITE (3592): n equals a,t,g, or c
  SITE (3593): n equals a,t,g, or c
  SITE (3594): n equals a,t,g, or c
  SITE (3595): n equals a,t,g, or c
  SITE (3596): n equals a,t,g, or c
  SITE (3597): n equals a,t,g, or c
  SITE (3598): n equals a,t,g, or c
  SITE (3599): n equals a,t,g, or c
  SITE (3600): n equals a,t,g, or c
  SITE (3601): n equals a,t,g, or c
  SITE (3602): n equals a,t,g, or c
  SITE (3603): n equals a,t,g, or c
  SITE (3604): n equals a,t,g, or c
  SITE (3605): n equals a,t,g, or c
  SITE (3606): n equals a,t,g, or c
  SITE (3607): n equals a,t,g, or c
  SITE (3608): n equals a,t,g, or c
  SITE (3609): n equals a,t,g, or c
  SITE (3610): n equals a,t,g, or c
  SITE (3611): n equals a,t,g, or c
  SITE (3612): n equals a,t,g, or c
  SITE (3613): n equals a,t,g, or c
  SITE (3614): n equals a,t,g, or c
  SITE (3615): n equals a,t,g, or c
  SITE (3616): n equals a,t,g, or c
  SITE (3617): n equals a,t,g, or c
  SITE (3618): n equals a,t,g, or c
  SITE (3619): n equals a,t,g, or c
  SITE (3620): n equals a,t,g, or c
  SITE (3621): n equals a,t,g, or c
  SITE (3622): n equals a,t,g, or c
  SITE (3623): n equals a,t,g, or c
  SITE (3624): n equals a,t,g, or c
  SITE (3625): n equals a,t,g, or c
  SITE (3626): n equals a,t,g, or c
  SITE (3627): n equals a,t,g, or c
  SITE (3628): n equals a,t,g, or c
  SITE (3629): n equals a,t,g, or c
  SITE (3630): n equals a,t,g, or c
  SITE (3631): n equals a,t,g, or c
  SITE (3632): n equals a,t,g, or c
  SITE (3633): n equals a,t,g, or c
  SITE (3634): n equals a,t,g, or c
  SITE (3635): n equals a,t,g, or c
  SITE (3636): n equals a,t,g, or c
  SITE (3637): n equals a,t,g, or c
  SITE (3638): n equals a,t,g, or c
  SITE (3639): n equals a,t,g, or c
  SITE (3640): n equals a,t,g, or c
  SITE (3641): n equals a,t,g, or c
  SITE (3642): n equals a,t,g, or c
  SITE (3643): n equals a,t,g, or c
  SITE (3644): n equals a,t,g, or c
  SITE (3645): n equals a,t,g, or c
  SITE (3646): n equals a,t,g, or c
  SITE (3647): n equals a,t,g, or c
  SITE (3648): n equals a,t,g, or c
  SITE (3649): n equals a,t,g, or c
  SITE (3650): n equals a,t,g, or c
  SITE (3651): n equals a,t,g, or c
  SITE (3652): n equals a,t,g, or c
  SITE (3653): n equals a,t,g, or c
  SITE (3654): n equals a,t,g, or c
  SITE (3655): n equals a,t,g, or c
  SITE (3656): n equals a,t,g, or c
  SITE (3657): n equals a,t,g, or c
  SITE (3658): n equals a,t,g, or c
  SITE (3659): n equals a,t,g, or c
  SITE (3660): n equals a,t,g, or c
  SITE (3661): n equals a,t,g, or c
  SITE (3662): n equals a,t,g, or c
  SITE (3663): n equals a,t,g, or c
  SITE (3664): n equals a,t,g, or c
  SITE (3665): n equals a,t,g, or c
  SITE (3666): n equals a,t,g, or c
  SITE (3667): n equals a,t,g, or c
  SITE (3668): n equals a,t,g, or c
  SITE (3669): n equals a,t,g, or c
  SITE (3670): n equals a,t,g, or c
  SITE (3671): n equals a,t,g, or c
  SITE (3672): n equals a,t,g, or c
  SITE (3673): n equals a,t,g, or c
  SITE (3674): n equals a,t,g, or c
  SITE (3675): n equals a,t,g, or c
  SITE (3676): n equals a,t,g, or c
  SITE (3677): n equals a,t,g, or c
  SITE (3678): n equals a,t,g, or c
  SITE (3679): n equals a,t,g, or c
  SITE (3680): n equals a,t,g, or c
  SITE (3681): n equals a,t,g, or c
  SITE (3682): n equals a,t,g, or c
  SITE (3683): n equals a,t,g, or c
  SITE (3684): n equals a,t,g, or c
  SITE (3685): n equals a,t,g, or c
  SITE (3686): n equals a,t,g, or c
  SITE (3687): n equals a,t,g, or c
  SITE (3688): n equals a,t,g, or c
  SITE (3689): n equals a,t,g, or c
  SITE (3690): n equals a,t,g, or c
  SITE (3691): n equals a,t,g, or c
  SITE (3692): n equals a,t,g, or c
  SITE (3693): n equals a,t,g, or c
  SITE (3694): n equals a,t,g, or c
  SITE (3695): n equals a,t,g, or c
  SITE (3696): n equals a,t,g, or c
  SITE (3697): n equals a,t,g, or c
  SITE (3698): n equals a,t,g, or c
  SITE (3699): n equals a,t,g, or c
  SITE (3700): n equals a,t,g, or c
  SITE (3701): n equals a,t,g, or c
  SITE (3702): n equals a,t,g, or c
  SITE (3703): n equals a,t,g, or c
  SITE (3704): n equals a,t,g, or c
  SITE (3705): n equals a,t,g, or c
  SITE (3706): n equals a,t,g, or c
  SITE (3707): n equals a,t,g, or c
  SITE (3708): n equals a,t,g, or c
  SITE (3709): n equals a,t,g, or c
  SITE (3710): n equals a,t,g, or c
  SITE (3711): n equals a,t,g, or c
  SITE (3712): n equals a,t,g, or c
  SITE (3713): n equals a,t,g, or c
  SITE (3714): n equals a,t,g, or c
  SITE (3715): n equals a,t,g, or c
  SITE (3716): n equals a,t,g, or c
  SITE (3717): n equals a,t,g, or c
  SITE (3718): n equals a,t,g, or c
  SITE (3719): n equals a,t,g, or c
  SITE (3720): n equals a,t,g, or c
  SITE (3721): n equals a,t,g, or c
  SITE (3722): n equals a,t,g, or c
  SITE (3723): n equals a,t,g, or c
  SITE (3724): n equals a,t,g, or c
  SITE (3725): n equals a,t,g, or c
  SITE (3726): n equals a,t,g, or c
  SITE (3727): n equals a,t,g, or c
  SITE (3728): n equals a,t,g, or c
  SITE (3729): n equals a,t,g, or c
  SITE (3730): n equals a,t,g, or c
  SITE (3731): n equals a,t,g, or c
  SITE (3732): n equals a,t,g, or c
  SITE (3733): n equals a,t,g, or c
  SITE (3734): n equals a,t,g, or c
  SITE (3735): n equals a,t,g, or c
  SITE (3736): n equals a,t,g, or c
  SITE (3737): n equals a,t,g, or c
  SITE (3738): n equals a,t,g, or c
  SITE (3739): n equals a,t,g, or c
  SITE (3740): n equals a,t,g, or c
  SITE (3741): n equals a,t,g, or c
  SITE (3742): n equals a,t,g, or c
  SITE (3743): n equals a,t,g, or c
  SITE (3744): n equals a,t,g, or c
  SITE (3745): n equals a,t,g, or c
  SITE (3746): n equals a,t,g, or c
  SITE (3747): n equals a,t,g, or c
  SITE (3748): n equals a,t,g, or c
  SITE (3749): n equals a,t,g, or c
  SITE (3750): n equals a,t,g, or c
  SITE (3751): n equals a,t,g, or c
  SITE (3752): n equals a,t,g, or c
  SITE (3753): n equals a,t,g, or c
  SITE (3754): n equals a,t,g, or c
  SITE (3755): n equals a,t,g, or c
  SITE (3756): n equals a,t,g, or c
  SITE (3757): n equals a,t,g, or c
  SITE (3758): n equals a,t,g, or c
  SITE (3759): n equals a,t,g, or c
  SITE (3760): n equals a,t,g, or c
  SITE (3761): n equals a,t,g, or c
  SITE (3762): n equals a,t,g, or c
  SITE (3763): n equals a,t,g, or c
  SITE (3764): n equals a,t,g, or c
  SITE (3765): n equals a,t,g, or c
  SITE (3766): n equals a,t,g, or c
  SITE (3767): n equals a,t,g, or c
  SITE (3768): n equals a,t,g, or c
  SITE (3769): n equals a,t,g, or c
  SITE (3770): n equals a,t,g, or c
  SITE (3771): n equals a,t,g, or c
  SITE (3772): n equals a,t,g, or c
  SITE (3773): n equals a,t,g, or c
  SITE (3774): n equals a,t,g, or c
  SITE (3775): n equals a,t,g, or c
  SITE (3776): n equals a,t,g, or c
  SITE (3777): n equals a,t,g, or c
  SITE (3778): n equals a,t,g, or c
  SITE (3779): n equals a,t,g, or c
  SITE (3780): n equals a,t,g, or c
  SITE (3781): n equals a,t,g, or c
  SITE (3782): n equals a,t,g, or c
  SITE (3783): n equals a,t,g, or c
  SITE (3784): n equals a,t,g, or c
  SITE (3785): n equals a,t,g, or c
  SITE (3786): n equals a,t,g, or c
  SITE (3787): n equals a,t,g, or c
  SITE (3788): n equals a,t,g, or c
  SITE (3789): n equals a,t,g, or c
  SITE (3790): n equals a,t,g, or c
  SITE (3791): n equals a,t,g, or c
  SITE (3792): n equals a,t,g, or c
  SITE (3793): n equals a,t,g, or c
  SITE (3794): n equals a,t,g, or c
  SITE (3795): n equals a,t,g, or c
  SITE (3796): n equals a,t,g, or c
  SITE (3797): n equals a,t,g, or c
  SITE (3798): n equals a,t,g, or c
  SITE (3799): n equals a,t,g, or c
  SITE (3800): n equals a,t,g, or c
  SITE (3801): n equals a,t,g, or c
  SITE (3802): n equals a,t,g, or c
  SITE (3803): n equals a,t,g, or c
  SITE (3804): n equals a,t,g, or c
  SITE (3805): n equals a,t,g, or c
  SITE (3806): n equals a,t,g, or c
  SITE (3807): n equals a,t,g, or c
  SITE (3808): n equals a,t,g, or c
  SITE (3809): n equals a,t,g, or c
  SITE (3810): n equals a,t,g, or c
  SITE (3811): n equals a,t,g, or c
  SITE (3812): n equals a,t,g, or c
  SITE (3813): n equals a,t,g, or c
  SITE (3814): n equals a,t,g, or c
  SITE (3815): n equals a,t,g, or c
  SITE (3816): n equals a,t,g, or c
  SITE (3817): n equals a,t,g, or c
  SITE (3818): n equals a,t,g, or c
  SITE (3819): n equals a,t,g, or c
  SITE (3820): n equals a,t,g, or c
  SITE (3821): n equals a,t,g, or c
  SITE (3822): n equals a,t,g, or c
  SITE (3823): n equals a,t,g, or c
  SITE (3824): n equals a,t,g, or c
  SITE (3825): n equals a,t,g, or c
  SITE (3826): n equals a,t,g, or c
  SITE (3827): n equals a,t,g, or c
  SITE (3828): n equals a,t,g, or c
  SITE (3829): n equals a,t,g, or c
  SITE (3830): n equals a,t,g, or c
  SITE (3831): n equals a,t,g, or c
  SITE (3832): n equals a,t,g, or c
  SITE (3833): n equals a,t,g, or c
  SITE (3834): n equals a,t,g, or c
  SITE (3835): n equals a,t,g, or c
  SITE (3836): n equals a,t,g, or c
  SITE (3837): n equals a,t,g, or c
  SITE (3838): n equals a,t,g, or c
  SITE (3839): n equals a,t,g, or c
  SITE (3840): n equals a,t,g, or c
  SITE (3841): n equals a,t,g, or c
  SITE (3842): n equals a,t,g, or c
  SITE (3843): n equals a,t,g, or c
  SITE (3844): n equals a,t,g, or c
  SITE (3845): n equals a,t,g, or c
  SITE (3846): n equals a,t,g, or c
  SITE (3847): n equals a,t,g, or c
  SITE (3848): n equals a,t,g, or c
  SITE (3849): n equals a,t,g, or c
  SITE (3850): n equals a,t,g, or c
  SITE (3851): n equals a,t,g, or c
  SITE (3852): n equals a,t,g, or c
  SITE (3853): n equals a,t,g, or c
  SITE (3854): n equals a,t,g, or c
  SITE (3855): n equals a,t,g, or c
  SITE (3856): n equals a,t,g, or c
  SITE (3857): n equals a,t,g, or c
  SITE (3858): n equals a,t,g, or c
  SITE (3859): n equals a,t,g, or c
  SITE (3860): n equals a,t,g, or c
  SITE (3861): n equals a,t,g, or c
  SITE (3862): n equals a,t,g, or c
  SITE (3863): n equals a,t,g, or c
  SITE (3864): n equals a,t,g, or c
  SITE (3865): n equals a,t,g, or c
  SITE (3866): n equals a,t,g, or c
  SITE (3867): n equals a,t,g, or c
  SITE (3868): n equals a,t,g, or c
  SITE (3869): n equals a,t,g, or c
  SITE (3870): n equals a,t,g, or c
  SITE (3871): n equals a,t,g, or c
  SITE (3872): n equals a,t,g, or c
  SITE (3873): n equals a,t,g, or c
  SITE (3874): n equals a,t,g, or c
  SITE (3875): n equals a,t,g, or c
  SITE (3876): n equals a,t,g, or c
  SITE (3877): n equals a,t,g, or c
  SITE (3878): n equals a,t,g, or c
  SITE (3879): n equals a,t,g, or c
  SITE (3880): n equals a,t,g, or c
  SITE (3881): n equals a,t,g, or c
  SITE (3882): n equals a,t,g, or c
  SITE (3883): n equals a,t,g, or c
  SITE (3884): n equals a,t,g, or c
  SITE (3885): n equals a,t,g, or c
  SITE (3886): n equals a,t,g, or c
  SITE (3887): n equals a,t,g, or c
  SITE (3888): n equals a,t,g, or c
  SITE (3889): n equals a,t,g, or c
  SITE (3890): n equals a,t,g, or c
  SITE (3891): n equals a,t,g, or c
  SITE (3892): n equals a,t,g, or c
  SITE (3893): n equals a,t,g, or c
  SITE (3894): n equals a,t,g, or c
  SITE (3895): n equals a,t,g, or c
  SITE (3896): n equals a,t,g, or c
  SITE (3897): n equals a,t,g, or c
  SITE (3898): n equals a,t,g, or c
  SITE (3899): n equals a,t,g, or c
  SITE (3900): n equals a,t,g, or c
ttatgtatggtgaaaagttggggttcagtttcattcttctgcatatggctagctagttatcccaacatcatttgttacatagggagtccttttcccattgcttatttttgtcaactttgtcaaagatcagatggttataggtgtgcagctttatttctgggctctctaatctgttccattggtctatgtgtctgttttcgtacaagtaccatgctcttttggttcttgtagtctgatagcatagtttgaagtcaggtaatgtcatacctctgtcgttgttctttttgcttaggattatcttggctatttaggttcttttttggttccatatgaattttgtggtagtttttttctaattctgtgaaaagtgacattggtagtttgataggaatagtgttgaatgtgtagattgctttgggcagtatggccattttaacaatattgattcttcctatccatgagcatggaatatttttttttttttttttaatttatttttttattgataattcttgggtgtttctcacagagggggatttggcagggtcatgggacaatagtggagggaaggtcagcagataaacaagtgaacaaaggtctctggttttcctaggcagaggaccctgcggccttccgcagtgtttgtgtccctgattacttgagattagggattggtgatgactcttaacgagcatgctgccttcaagcatctgtttaacaaagcacatcttgcaccgcccttaatccatttaaccctgagtggacacagcacatgtttcagagagcacagggttgggggtaaggtcacagatcaacaggatcccaaggcagaggaatttttcttagtgcagaacaaaatgaaaagtctcccatgtctacttctttctacacagacacggcaaccatccgatttctcaatcttttccccacctttcccgcctttctattccacaaagccgccattgtcatcctggcccgttctcaatgagctgttgggcacacctcccagacggggtggtggccgggcagaggggctcctcacttcccagtaggggcggccgggcagaagcgcccctcacttcctgggcggggcggctggccgggcggggggctgacccccccacctccctcccggacggggcggctggccggtcggggggctgaccccccacctccctcccggacggggcggctggccaggcagaggggctcctcacttcccagtaggggcggccgggcagaggcgcccctcacctcccggacggggcggctggccgggcaggggggctgaccccccccacctccctcccggacggggcggctggccgggcggggggctgacccccccacctccctcgcggacggggcggctggccgggcagaggggctcctcacttcccagtaggggcggccgggcagaggcgcccctcacctcccggacggggcggctggccgggcaggggggctgaccccccccacctccctcccggacggggcggctggccgggcggggggctgacccccccacctccctcgcggacggggcagctggccgggcagaggggctcctcacttcccagtaggggcggccgggcagaggcgcccctcacctcccggacggggcggctggccgggcaggggggctgaccccccccacctccctcccggacggggcggctggccgggcaggggggctgaccccccccacctccctcccggacggggcggctggccgggcggggggctgacccccccacctccctcgcggacggggcggctggccgggcagaggggctcctcacttcccagtaggggtggccgggcagaggcgcccctcacctcccggacggggcggctggccgggcaggggggctgaccccccccacctccctcccggacggggcggctggccgggcggggggccgacacccccacctccctcccggacggggcggctggccgggcggggggccgacccccccacctccctcccggacggggcggctggccgggcagaggggctcctcacttcccagtaggggcggccgggcagaggcgcccctcacctcccagacggggcggctggccgggcggagggctgacccccccacctccctcccggacggggcggctggccgggcagaggggctcctcacttcccagtaggggcggccgggcagaggcgcccctcacctcccggaccgggcggctggccgggcagggggctgacccccccacctccctcccggatggcacggctggccgggcggggggctgaccccccacctccctcccggatggggcagctggccgggcggggggctgaccccccctcacctccctcccggatggggtggctgccgggcggagatgctcctcacttcccagatggggtggctgctgggcggagaggctcctcacttctcagacggggcagctgccgggcggaggggctcctcacttctcagacggggtggttgccaggcagagggtctcctcacttctcagacggggcggccgggcagagacgctcctcacctcccagacggggtctcggccgggcagaggcgctcctcacatcccagatggggcggtggggcagaggcgctccccacatctcagacgatgggcggccgggcagagacgctcctcacttcctagatgtgatggcggctgggaagaggcgctcctcacttcctagatgggatggcggccgggcggagacgctcctcacttcccagactgggcggccgggcagaggggctcctcacatcccagacgatgggcggccaggcagagacactcctcacttcccagacggggtggcggccgggcagaggctgcaatctcggcactttgggaggccaaggcaggcggctgggaggtggaggttgtagtgannnnnnnnnnnnnnnnnnnnnnnnnnnnnnnnnnnnnnnnnnnnnnnnnnnnnnnnnnnnnnnnnnnnnnnnnnnnnnnnnnnnnnnnnnnnnnnnnnnnnnnnnnnnnnnnnnnnnnnnnnnnnnnnnnnnnnnnnnnnnnnnnnnnnnnnnnnnnnnnnnnnnnnnnnnnnnnnnnnnnnnnnnnnnnnnnnnnnnnnnnnnnnnnnnnnnnnnnnnnnnnnnnnnnnnnnnnnnnnnnnnnnnnnnnnnnnnnnnnnnnnnnnnnnnnnnnnnnnnnnnnnnnnnnnnnnnnnnnnnnnnnnnnnnnnnnnnnnnnnnnnnnnnnnnnnnnnnnnnnnnnnnnnnnnnnnnnnnnnnnnnnnnnnnnnnnnnnnnnnnnnnnnnnnnnnnnnnnnnnnnnnnnnnnnnnnnnnnnnnnnnnnnnnnnnnnnnnnnnnnnnnnnnnnnnnnnnnnnnnnnnnnnnnnnnnnnnnnnnnnnnnnnnnnnnnnnnnnnnnnnnnnnnnnnnnnnnnnnnnnnnnnnnnnnnnnnnnnnnnnnnnnnnnnnnnnnnnnnnnnnnnnnnnnnnnnnnnnnnnnnnnnnnnnnnnnnnnnnnnnnnnnnnnnnnnnnnnnnnnnnnnnnnnnnnnnnnnnnnnnnnnnnnnnnnnnnnnnnnnnnnnnnnnnnnnnnnnnnnnnnnnnnnnnnnnnnnnnnnnnnnnnnnnnnnnnnnnnnnnnnnnnnnnnnnnnnnnnnnnnnnnnnnnnnnnnnnnnnnnnnnnnnnnnnnnnnnnnnnnnnnnnnnnnnnnnnnnnnnnnnnnnnnnnnnnnnnnnnnnnnnnnnnnnnnnnnnnnnnnnnnnnnnnnnnnnnnnnnnnnnnnnnnnnnnnnnnnnnnnnnnnnnnnnnnnnnnnnnnnnnnnnnnnnnnnnnnnnnnnnnnnnnnnnnnnnnnnnnnnnnnnnnnnnnnnnnnnnnnnnnnnnnnnnnnnnnnnnnnnnnnnnnnnnnnnnnnnnnnnggaaaaaaaaaaaaaaaaaaaaaaagaaaaaaaaaaaaagaagaaaaaaaaaagaaaaaaaaaaaaaaaaaagaaaaaagaaaaaagaaaaaaaaaagagagaaaaagaaagaagaaaaaaaaaaagaaaaaaaaaaaaaaaaaaaaaaagaagagaaaaaaaaaaaaaaaaaaaaagaaaaaaaaaaaagaaaaaaaaaaaaaaaaaaaaaaaaaaaagaaaaaaaaaaaaaaaaaaaaagaaaagaaaaaaaaaaaaaaaaaaaa

SEQ ID NO: 1146 - DNA, 756 bp, Homo sapiens; identical to SEQ ID NO: 1143

SEQ ID NO: 1147 - DNA, 25279 bp, Homo sapiens
cttagcttcttccaaaggagaccatctgaccacaattttctactactgcagaagcattgctgtgaagttccctttcccagctgcctccactaatctgcaaaaagcactttctaaagcactggaaaggtagggttgtttggttttttttttctctttccaagaggactttgtaacctggagccttaattcctcataatttggtttacagaaaataacggcctatgcttctcttatttctaaacatatagatttttcataatttgtgtatagtcactgaatttcatccaatcaatatctgattcagtcccagtaaaagagtacacaggctgttaatactgactcatcttgagtgtgttgcagttgaaaaatcagtcaaatacagctcttttgtgtatcaagtatttagcaagccagtgcctccttaaacagttgtagccaatttgctgcttatgattcatggaatttttttctttcatttcagccgagatgaggtgaaaaccaagtggggtgtttctgacttcatcaaggcctttattaaattccacggtcatgtgtacctgagtaagagcttggaaaagttgagccctcttcgagagaaattggaagaacagtttaaggttagatttcagaaatagagaatttttgtcttgtctaaatcaggaagcataacatttggaggaaactgactcccagtttttgtagttacttaactgtgtgaactattggtaaaaattatattcgaagtatgtgaaatctttgcatttatcatcccttcaatttaaactgaggtacagtctgtataaacaaatataatatagcagtgttttcacttgagtagttgccatttgacaaaaattatcaaagtggaaaaaaataaataactcctcagttttgaaactactactacttttgatggtttgtgtattcttagatatgattatgttacctgctttatagatattggcattctccaaaccaagttcattatttttattgtgcttgcattcatcaggattgtggtagtttgaatgaaaggaatgagagtttcatttaacagggatatattttactaatttgaagagataacattaaccttcattctatttatatatgtgaaaatgatcttttattagtatgttaagatattagcagtttaaatgtataatgcataaaataaggagaaagtcaaaagtattaactttttttcagttcatgtattcaaataaatatttgactactcatcggtcattgttttaggcactgtgttaaacagtaaatgacaatttcaaagaacattttatatttcttggttatttctaggtatctatatacttgggtaattgtgtataactgcttcatagtatttctgtaagttctttataagtcaggcattttaagagattgtagaacttggacagttaaggtgtcacttagccaaaaatagtcaatgcgaaatagtttttacaggtaatcgctttttggttgatactttctatgtgcaagatattagaatagataattataaatagcaatagtttgttttgttttaaaatatacttagcctgtgacatatgatgtataaggttgggtgtgtgaaaggaacagctaactttgtcatgtcctaggctgttcagcctggaaaagaacaaacaagtctaaatagttttcatagtaagtattcagacatgtgaaggattatttgaaaagaacatacctgtatctttcctgaagtcaaaactaaaatcttaaattttaagttgaaatctatagggggctgaccgtgggatgttgtggattctccattttggagagcttaacagtcagattgacagccatctttcttggattatttaagtgcagtcctactaaataggggattggactagaaaacttcttgagattgcttccagctctggttctgtgaaatactctctaaattggtggtggtgggtggtccctaccttaatgagatcttcactaactaagttattctagtctaaaaacctagtaagttttgcatttggttcaacctcaaacactaacactctcttcacatatatatttctgtatgtgaagttctggtaagtgtgggtgggcagtttctaaaatatactttgaagtatcattccagcactctaaagttaaacataaaacatagtatgaggcagatctatttgaaagcttacccagtgttgaactagaacattgctggagtgaaattttaacatagtggagtaaaatttccaaagtatttctaaagcatatgtagataattagtatcatcaacatgtatacttcagtgtttctaacaacctttagctactaagcagaaatgtttaccaagttgaggtccactaagggatttaaggcctgggatctgggaattgagatgtaatacattttctgtaagttaaatgtgggctgtttgttaatggtatttatttcagtatatttctcaactgtagttgaaagtttgagtagcaaaaatcttatcagttctaatctgactttattccttggaagactctctacaatataatctaaattttaggaaattacaactgaataacttcaaccttatttctgaatggataggttgttcattcactaagtgtttattaagtacccgctatgtaccatgcacttttctaggcttttagagatataggggaaaacatgacaaagtctggaccttcatgaacttatattatcatttgttagtactagggtgtattcatattcattaatacttctgtgcatacgctagaaaattctttaatgggctgtgaccctcttcagtaggatattgccttctaaaattaatgccagcggatttatagatacaggaaatacattaccatattgtgcttgtaagaaactgctttttgagaaatacaactacatattctcattttatgccagtattatttgaataaacgccagctgatttagaaggttagttgtagaaactgaaggagaaattttgtgggaaaattctagagaagagacaggatttcaggaaattttgaggaaagattaatgcttgatgtctttggaaaagggctaatcattctagacatatacaatgaaatagattgcaagaagactgacagtgtgatagaaagagttcatgtagaatggaattatattctctaatgataatgtaaaagacttccctcttagaatcgtagagcttactatggctatttcaggttctttatgtaaataaaaacaaaaatctcagagtagtctgggcagagacagctgtaagtttctgacatggtaggatctcctgtcactgctggtagaactgtaagtaaggattatctgttttccgccataatgctagtgataatgaatccctgctctctgcaaaaatttcccctgggcatagaggaagactggctatggctaaagtgtaggatgaaactaggaacttctgttagaaaagtatttttgcctgcaggtaatctaaaataattgcagatattaaagtagaagggtaattccattgagacaccaactgagagcatctgggtgattttttatagtgctggttaacagatcactgtgaacacagttattagaaggtaaatgaaatttgatgatcacgcatgtacttctctaagaggggaaaataccagttgataatttgtagaagtacctataatacatcctaatgttgttttagtatgccatttaccctgtgttccagaatatgtacttgctatgccttgtttataaaataagttttaatgtatcaagcctctgaaagagtaaattttatgacaaatctgggaagtcatgctttatgtactgggagttcaaaaaattattttttgagtctgttgctttctagtcatttgtcccaacttaatattttaatatgtatacatcttgtataaaacaatttctaaaggattaagttgtataaatttatggatgaacactcaaagacttttgtcaggtcatatttaaaaatatatagtttcctaggagaaaaaagtttgttgataaacaattcaaacaactctgtggtgtctagattaattcctttcaagacaaaaagtcagtttgggaaataattagacccagtcaaaatactgggattgagggcagaaccatttactcatctgtaattctattacacatggtggttctaaatgcagactaccagtttaatttcttgtgtcaaagatggttcctgttcttgataatatatgcagtacgtctgtcttcttttacagaggctgctattccaaaaagctttcaactctcagcagttagttcatgtcactgtcattaacctgtttcaacttcatcaccttcgtgactttagcaatgaaaccgagcagcacacttatagccaagatgagcagctatgttggacacagttgctggccctctttagtgagtattgaattacttaacatgtgccatcttttttgaaaaacatcatcttaggcatttcatcgatgtagcaaagcacagtgacataaaaaagcatagtgtatttcttacactgaatcaggagttcataataactttcaaccccaagttctatccttttatctgctgataccccctcatcaagttgtaactataacatttttaatatgggaaagaaagcgtctttttagaaagaagctgtaagatactcaagtgttaaacagaatatagtagaaggcacataatattttaatttgaactggcacagtttcatatttcttatgctttttgaatacatttttttttcaagtgtcttttcttggcatcctgtgcaagtgtcctctacagaatgagtctcaggaggagtcctacaatgcctatcctcttccagcagtcaaggtctccatggactggctaagactcagacccagggtctttcaggaggcagtggtggatgaaagacagtagtaagtatttttagaatttcatgttaacttgtgtgctttgtttgtttgatatccataaatatgtaaaaactgccttctaaaatacaacatttgaacaatagaatactgtattttctgccgactctcgggaattgaactgaagacctctttgtacgcttttcatttgtttatttgaattcttcatgtgaggcttatttttaaggatttgtgactccttgtacactcccttgttcccagttgctgtcctggggaaaaggcatttttcacatttcaaagtgaacttgaagtaaaaccagtttgtttcttatctattacagtattccttaattttttgtttgagttgaagggaagagatttttattccatttttttctgtacatgaactgtttgatgttgccttacagtaacactcaatttgaataatatttgtttatttgaagcataaagattgaaagttattttgattctcaccattttctctgtcatctctactcacagtaattctgacagctcttaggaaccattgattttacaatgacaaatgaaaactttcagtgtacctttgattatagaaataaatacttccaaggtggcttggcaccaaataggaagttcctcccctgcatattttgatggtatatttaaggagaatctctttgaaagttttgctttgtggcccagcatgtatattgaccaaggtcacaacttagaaaatgccttttttaagccacatttaagaccctgtgggccaagcactgtggctcatgcctgtaatcccagcacttggggaggctgaggcaggcggatcacttgaggtcaggagtttgagaccagcctggccaacatggtgaaaccccatctcttttactaaaaatacaaaagatattagccaggcattgtggcatatgcctgtaatcccaccacttcgggaggctgagacaggaaaatcgcttgaacccaggaagcagaggttgcggtgagctgagatcgcgccattgtactccagcctgtctcaaaaaaaaaaaaagaaagaccttatggtctgtctgcttcataattgtcttttctctcatgtagttataagctctttccatgatatattgacattatcatgaatagagtttaggaacatagcacagcatactatatacatctccttttaatgttagcattggttttagtaatacggattttcagacattgcttccttgcataaaatttttatttcttaactcaggctatacagtttttctactcttgtgtactctagaactcaaatttatgtttaattcaatatattatatcagtaatgttacaaaagaagaactgcatgttttaccatttgcttatagagtttttatatttatgggtaggaattgttattttcattgtgttttgttttttcttattgttgttcttgtacagtgatccttttggcccattctgtgtgttcccatttcttctcatggcaaaagatgttgaaccagaaggaacagctttattggcaaacattttttccctccatttttttctgtcatttactctttccacttcctcctatcagatttaccaaaatctttagaattatgcccttgtaggtgtttgattctgtgttaaattatgttagtactcattttaaagactagcatgggatatcactttaaaactgaagatttttccttgtgtgtctaatacactaaagttataatgttcatttatatcttttaagtaatggaaaaacaatgactgtttcttttgtgaactcagaattttatgtatattcaaataatcttcagtttcttatatctgggccttctcaatttctagaatttactttcccttgtacttttttgagaacatactctcttaagctaatgaatacatggaatagtgattttcctttgtagaaaatagttatagggtaaagcagtatatcattaggtaatccactcatgcgctttttctacagtgttttctcgagagcttatgtgtgttgcatgaagacattgtacagtatagtattctcttttagtttactgacctttttttccaactatctcttgtaatctgttacatctccaaaggtttgtagcagacgtttattcttcaatatttgtttatatatttttaatatgtgtatatatttgttgatatttttaaagtagcatattcccatatttcagagtgtacaactgtcccaaatagttaacttacaattttccgtagtgtgattatttacgtccagtttctctatcctgggcacttcacctcatgcttttctttttctttctttcttttttaataaaaattggttgatacatattcagaggtaagcttcatattaaggagaatgtgattagacagatgagtctactgtaggaaaatcaaagtaattgtttccaggccaaaaccaattattttaagctaattactttaaccaaataattttaagcaacatggctacttccacccatcacatctattcctcaccccagcaaatgaacactcaaactacttggatttgtctcacttcaaaaatcttgccctgtcatatataatacatcagatttataaattgctcttatgtttgaaagataacagagattttgatacaaatgtttatatgtaaagtgatatttataaatctgtatccataatggaaactttaacatacctcactcaggaaccaaggacacagttaacaaatacatatatagtacgtacttctgaatagtggaaagaatatgttctaatatttcatgtgtaagctttcacaaaaattgtgtattaagaaacagagtttagagttaaggcttttgtaaaaatgtggactttttgtaccataaaaaaagaggcattatcactttgaacagggaatgtgatttgtgtggtataaccataccctgtcacagattaaagaactaacagcggcttccacaactcataatgtatgtgaaagctctataaaaacatagtatgttatttctttgctcagaattttctcagcctatttcagttttccatgtttaaaactgacaaattattttcaccatttgttgaattaggagcatgggaaatgatctacagtggtagtaggtctctgtcatggaaatttgtcccttttgttgtatctttatcattatctagtgtatctttgaaagtacatttttaaaaattatacagcctttgaaatgctgaaataagggaaaaatacataaagtccaggacctatagataccattttcatggcttattagtgttctggtttctcttacataaaaataaagtctgaactctttctttaatttacagcatttggccctggttgatttctcttctgaatagtttccatccccatgaagaggacctctcaagtattagtggtaagggctaccctaaccttgtgttgttgatgtggttctccatcattaatggtggcttaatgccagagaaaaagaggtttttggtgatgaatgattgattttaaattcagtatctcagaagtgactgtgaactctacataagtgggtgggtggaagtagataatgttctcccagttcttctggcagcttattctcatttagcatcattcaaataggagttcagagagtgtaataccttcagattctttcattccttcctcctcattcttactattttaaaaaaagcaattaacatgaacattgctctgtcaaagtaatacttactcatcgtagaaaatttggtacaaagaaaaagaacacaaatctcccatacagagataccttttactagtcacgatagtatatcttcttcgggcctttttcttacgtgtgtacacacacacaggaaatgattcatatcaaataaagttttgtgcctgattttgaaatttggtattatattgttagcattttcttttgtcattaagcattttgaaaacatgacttttactggcttcataatattccatcctatggaagtgctataatctatttacgcactttctgttgctttaaaattttccccattataaataaataatgctgcactgaacaacctctggcttggcttctttctgactttttttttcctcttaaatccatgctcctcaggcattaatttgcacataaatcacctgaatctttttaaaatacagtttatgattcagtaggtttgaattagtgcccaagattctgcatttcttacaagctctcagatgatgtcaatgttattcaatactttcagtaaaaagagacaggtaatctaaacattgggcttactggatccaagactatgaatttttaagactgctgattttttaaaaagccattctcctcagcattgagtattaggtgagtgttaggggaatgtctgtgtcccaaagataacatgcagagttttgacaggtgagttattttcatcaggatcatgataaagaagagcagagaacaataagcattataatttctttctgtatgttaatttttaaaaaaatttagtgaacagtattccaccaaacaacattttaattaaaatgtttgcaaattttgattttgaccctttagcgacaccacttccagaggagtttgaattacaaggatttttggcattgagaccttctttcaggtaggtgatagctgaagtacctttatcattgccagtgattgcagtattaaaattagcagagaattgggcttggatgtagaggaacctttgatctgtcccagctgtgtgttatttttgtaacgtcaactaatactgaaagttgttgtgaattggatttgtgtatgtcacgccttcaattcctgtgtaataaaaattaaaatgtaacctttccatctgtgcccttgatcccatcccttctcacctccctaagaaccttgctccatctgttatcctctctgcattgtatttccagtgtcttgtctttctttcctttcttttttaaacaactaattatctttagcctagtaacatttaagtgtgccccattcttttaaaaaggtaaaatgaatttacatccctctattttcctacgttgccttatcttttcatcatcaaacttcttaaaaagagtagtatgcactttgggaggcggaggcaggtgaatcatgaggtcaggagatcgagaccatcctggctaacccggtgaaaccccgtctctactaaaaatacaaaaaaaaaaattagccgggcatggtggcgggtgcctatagtcccagctacccaggaagctgaggcaggagaatcgcttgaacccaggaggcagaggctgcagtgagctgagagatcacgccactgcactccagcctgggtgacagagtgagactccgtctcaaaaaaaaaagagtagcgtgggccaacctgactgactccacttcaactcctgatcattttcagcctactgtggtttaaactatcagtgccttctagataccaaaatccagtgactatagtctttatcctattgaattttcttcagcattgagtccgtcgatttccttccttcatgaaacctttttccttagctctgtgatgcaatttttcccacccttagcactcagtctttttcactatttcttttaaactacatgcctctgaatgttgttgttttccaggattcttttcttgccctttccttctcactttgtacattcaccctgttaatcaaatccatccctatgtctcttgaatggtatgtcccaaattttcagctttgacttctcttgaagtttggatgcatattctaacaatctgacctcccttacgcattttaaactttaacgtgaccaaaaactgagcttatattttccgatttggtcagccaaaaagcaatcttctttctctattttctgtctgtgcctgtggcattacccatctatatgaccaagctagaaatctgaaaaacccttgtttctatttgtctttctcaccaagcctttataattatgtgtctgaaatgcttcttaggttcaagtccttccgtttatttccctatacatagttcaggcttttctcaccagtttacctgaagtataaaaaccttcctacgtatagttcttctcctcctatagtctgtttctacactgcctatagtttttaagtatggaaatagtgatgttgcatgactaatatttttatttacccattcccagttgctccactgtctcttttagcttgatgctcaagttccagcactatccagctcctagttgttcagccttattttcttccatttcccccagtatttataaactctatacactatgtgctatacttgaatagctccctatttttattcctccacacctttgttcatgttgtgcctagaacatttccttctcctctactgcccttccatcaccagcctggtaagcacttagccatacctgtcaaggtccagctcaggtatcactctatgaaacctttcagagcttctcagaaggaactcatcctccttttactatattcacttaattctttacatagttcttattatgcttatcagattgaatcataattatttattcccaaaggtagggactcttatttatctttgtgtcctcagcatctagccttctgcctggcaattcttaaatcttcttaaaaaaaaaaaaagtttaataaggagaaatctgaaaaatctttattttttcaggttggtttacccttctgatatcaatgagttattctatatgctttacgatatttatacatttttctgatttagaatggtccaccacaaagtggatagattaatattatttattaaaataggcacctcagagactcttagcattgccatggtcatttcaagcaaattacttggcatgcaagataaatgtttataaaactttattcttaaaatgataaaagaatctttcctaataaaaagttgtggtttgtttgagctccctgactagaaagtgaaatgtgagtaaaaatattacattaatgtaatgaatttgtatattttcttttctgctttgtttcatagtttgtaaaaatctctggtagtataaattctaataaatgcagttgattacatcaagtagctaacctatgtgggaagtaatctgaagccattacagttaatcaggtgaacttggttgcctggaaaatatctttagcaatttaatattctcataacttgcttgtgtcaattttaggaacttggatttttccaaaggtcaccagggtattacaggggacaaagaaggccagcaacgacgaatacgacagcaacgcttgatctctataggcaaatggattgctgataatcagccaaggtaagtctggaacttctggtctacccctttttaaccacctttttagataaacacatgcgcgcacacgcgcgcgcacacacacacatctcatatgttacgtattttaggctttggtataaatattgtcaatcatgaactcttaaatcgacatgttggtagcacaacatctaattataaccctagtgagtaagtatactctttatttagaatctctgttctccctattgtgtattacagaggtctttcttgtttatcgtgagtttctgctctaatttataaatatctctgtaaatctaactgaactgtactttcacagtcatggtaatttgtattggcctgggcatggtagtcagtttcaggcaggacagaccaagatcgtgctagtagccagttaagtacaaagcagatgtggtcgttagtgtagggaaaagaacgcaggttttgtaattccattggtttgagttccgtttcgagttccgcagcttctcaagtgggtgtccttgggatctccccagtagattataacctttccaaagtcactaactacttcctcatttttgtattcaggtttctgtcatacagtaggtcgttaaatgcttccatgtttgaatgaacttaccacctccaagcttcaattttcacatctatagaataggaattatatatagctaccttataggacatatcaagggccctagaccagtgtcttgcacttgaagcatgctcagaaaatgtaaattctagcaaacgttgaaagagccagagggataggttgtgacgatgttaagtgtgataatgagaacctcagtttctacataactactttttgtgttacctgaatccacattgttatatcctgctgttttcatggttattagtgctaggaatatattgacttggatccacacacaattcagttgttattttttaagttaatgttttttatatatggatttatttttgcttttttaggctgattcagtgtgaaaatgaggtagggaaattgttgtttatcacagaaatcccagaattaatactggaagaccccagtgaagccaaagagaacctcattctgcaagaaacatctgtgatagagtcgctggctgcagatgggagcccagggctaaaatcagtgctatctacaagccgaaatttaagcaacaactgtgacacaggagagaagccagtggttaccttcaaagaaaacattaagacacgagaagtgaacagagaccaaggaagaagttttcctcccaaagaggtgagaagggactatagcaaaggaataactgtaactaagaatgatggaaagaaggacaacaacaagaggaaaactgaaaccaagaaatgcaccttagaaaagttacaggaaacaggaaagcagaatgtggcagtgcaggtaagctgtatttgaactataaagcaggtagaggaaggctcacacaaaaggcaagatttttcattttgttctaaagccatgagaattggccgtcctggaagtttaaatgcattatttaattgcatagtaaggttatataaagagctgtgatagatggttactttttcaattcttgggaattgtgagtgaaaaaaaaatctcagcctgatttgacactttcgtcagtcttcaccaatttaagcagtttgaaaggattagttgcagagttgtcagtttcacacaggattatattttatttagaagatataactaccatttgtcaatgctatagtggagatttggggtcttctgtagatccagtagaaccaagagtatattaaggcttatgcagtttttttttttagattcactataatatatatatgtgtgtgtgtgtgtgtgtgtgtgtgtgtgtgtgtgtgtgtgtgtgtattttttttcttggaaaaatatgagacttttttattgacaattatacttgtcccggctattggtattaatatcactttaatcttatcctggatcctgggaatttataaaggaagaacccaggtttcttgctgggaaaagataagcactgctcagttatttgtgactttctttttattaatatattttcccaaatagaaaagatggtttcatgtaaacagaaaagggcctttattctgtgatggttttattaatactattaatgtttgaataaatacttaagcagccatgtgagttgttaacacattttagcaaatgtatgtgtttgcatgagaaactttacattgttgaaggctgcttacaaataaatagtacctttgaagtatttctctaatttttttgagaaagagaaataagaaaataatagttccattttaacattatagcaaggagagaaacagaaagacaaggtagaaattaagacataggggagagagagagatgctagggaaaggcaagaaaaaaaaaaatgaactagaaagccaaaggatccgagttttagagataatgagtccagcattttctgtttacctttcctccattctctgtaactgctcacaataaggtccagactgaaaatacaatctccttttttggtttctcatccatctcaaatcacctataaatgattaaagaaagaaagagtaaacatatcaccacactctgtacctcgtcccgggttttctataaatgctactcatgttccctcattttgctcaactttgagcagtgcatatgacatctactctctggctccatctataggatctcagggcctgttccttactgctgaaagtatccttatttattctgaagggtggtaaagttgcagggtggaaggtggatgcctgactgcacatatggctacccagatgaaatcaaactgagggccaaaataactcacctatgggttaatagtcattattagttcataattcatgtatgtcgtttaatgaattagagtatagagaaccctgggccccagaacaagcaacttaaagtcatagacaagtttttttcaacttgttagcatcaggcatctcatttgtaaaacaaatgggctctaaggtcctttacatttttggatttttgtgatcatgggaaagcaaaataattagtaaaactaagatagtaaaattatcttttattggctattaaataatttgctttgattttccatttttaacttaggtgaatttaaatatcttcagcatgtactttttgatctaatgaggttttaaatactttcttaggagtagggtcttctttctagcacatttgagtttcaatttattatagatagttttgcttctattggttacaggtaaaatcccagacagaactaagaaagactccagtgtctgaagccagaaaaacacctgtaactcaaaccccaactcaagcaagtaactcccagttcatccccattcatcaccctggagccttccctcctcttcccagcaggccaggtaaatatgttttgtaatttcttctacttaatcttttctgtgcaagaatttctattcagtcactgagaaatgtgttttctgttggagtaatgttactaagccataaaaagttctattttccctaatacttataaaattatttttgaactgtttgtgtgtagtgtacatacaagtgcatgtttgttattatgaaggaaatcctatcactaaatacagaagctactcacagaacactgattacttcagtggatagaggaaaaatatcaagtctatttttagttcttcaaatcaagttaaagattgacaacatgactaatctcttttgtgatgtgttagaagactccctctacctacctgttaaaaaaaaaatgactttttttgcaattttttgctgtttccttaaaactaaagctgtgttcttctgttttgaagggtttccgcccccaacatatgttatccccccgcctgtggcattttctatgggctcaggttacaccttcccagctggtgtttctgtcccaggaacctttcttcagcctacagctcactctccagcaggaaaccaggtgcaagctgggaaacagtcccacattccttacagccagcaacggccctctggaccagggccaatgaaccagggacctcaacaatcacagccaccttcccagcaaccccttacatctttaccagctcagccaacagcacagtctacaagccagctgcaggttcaagctctaactcagcaacaacaatcccctacaaaagctgtgccggctttggggaaaagcccgcctcaccactctggattccagcaggtaagttacagttgtgtgtactatccagctgaatgaaataaggggaaatgctgaaagattcaatgttagaaatgctcattaaactttgacatacttcttgcttagatttatagtgattatgggaaaacaaaagtattgtctctactgtttatgaaagttcaaatgttttccttactcttgtaaaggataaaatactagatcttaagtaccattcttggctgctactaagtgtccattttattgaaaatggattttctgcaaataattctcctataggaacataaactactagggaaatagaatcacagtcttgatgaggtgctaagacagatgtgacaccaatcttaaatgttgtcgttggaagcacagcacttgaagcagaaaggggaaacaaacactcttatgcaaatatattcattcattcattaaacctcttaaatagttgaattaaaagaaaatatgagtgtggtgcccataatctgtttccaaaaagctctgagtattgaatagcccaaaaggtaaaggaaactgctgccttgcctagagttttgttggttggaaaacaccccaagttcattctgtgattctttagcattcattataagtaatattgcattttatcctcacctttatgacaggcgtctcttttttagtatcaacaggcagatgcctccaaacagctgtggaatccccctcaggttcaaggcccattagggaaaattatgcctgtgaaacagccctactaccttcagacccaagaccccataaaactgtttgagccgtcattgcaacctcctgtaatgcagcagcagcctctagaaaaaaaaatgaagccttttcccatggagccatataaccataatccctcagaagtcaaggtcccagaattctactgggattcttcctacagcatggctgataacagatctgtaatggcacagcaagcaaacatagaccgcaggggcaaacggtcaccaggagtcttccgtccagagcaggatcctgtacccagaatgccgtttgaggtgtgtgttctttcctatcaccaggcaatttggagataggtctgaggttgactgtcttttgaatatctcaaatagatcttataaaaaggccactcttattcgttagtactatagaatgccactgagtattggtgtagctcttggtttcctcctcagagttgcacagtatgttttagtttggaagctgaagaattccgtaactgattttgaactctgatggtctggcaaagaaaccatgtacagaaatctctaaaacagcatgttagagaattctgagacaaagcactcctctcagttgggctgagtcatctaagtttaaaaataggtttactgatatttaaataaattgctctctgagaggaacaaggttagccagttatcttggacagtggaggtccctttctttgccctttttattcatgagaaacaggtgaatgttagtaactttttaaaagatctgtttctctgttagcacaagatatgctaatcattttgctccatagcattgttttactcactagccacattaaccttttgtgttctgctctgtcagtatttttgcttttctattgtcttgaactttctccattattgtccttgtgtcgctttgcctttgcatttcagagccttttttctctttgcctaataccatctatctcactatccccttgactttagttgtcttcttccacctaattatgctactattcctttatgcttttgttatcccttattgcttctcactgtgatgctttctgtcactaggaccccaagagctcccctctgcttcctccggacctgttaaagagtctggctgccttggaggaagaggaagagctgattttttctaaccctcctgatctttacccggctctgctggggcctctcgcctctcttcctggacgaagcctttttgtatgtatttgacataattctgcttcttggtctaacccccagctgcttctctgagatactgtagtacacagattaggtgatttcttctcttcctggggctgtccttttcagaactgtaaaacatattttctaattgcctaaaccaaccttaagttggtagtaggatatagcaaaacatttctgcctttatagttctcccaaatcatggagacataccttggttttatgtgttatccagaaagcattctgcagagctggtcacacacacgatgtgatggtgacaaattaactcactttgcaggtgacacttccatctggacccagaaattttaagtatcatttaatcttgcttaggaacagtgagatttatttctcatatgtagccaaaatatgaaaggaaatatgttcttgattttttttttgactgacattactgaacagtatatggctcttttttgtttggttaactaaatgcagaaagagccctgatctaaattcaaagttggattcataaacagaatgagtaaaaatgaagaggattctatttataaacattgtcagagtgtcataaatgagtaaatatgaaaataactagaatcacataaaataaaatctgagaactcagcctgcatttcaaagaacatcattctatatgcttgtcagtgttcatattatattttactgtgggtggggagtataaaagatggaaagaaagatgtatgctatgaggctttttcccctctctttattacaccttaataaaacataaaaagatagtaaattttactttcttgctgtttctttctcataaacacagggcaagaacacattcgtaaaattaaagtacattaattttagtgtcaagagaaataaaaccttaacagctttcatgacattgctgccatccctggcacttgaagttcccttaagaatttgcctgggtagtagcagtaggggccccataccaagttattaaataatagcaataaaagatccccctggagacttaaatggtagcagtgccatggctgagcgcacagggattgtggaagctcagctgctatactgttgcctctctatgtttgcctttcttgtggcttttatgctagagtggctttaaggactgagggtagtgcttctctgtctacttgtttcctaatcccttagttcctgttcctgttcccttagtgtccctttcattggaaatggagctgatggtagaacaagtgggagtattttcagggtttttttttcatgtttaaaagacaacaatgaataaaaaaaacttcgactataacccttccaatatttaacattaatgatacaacgtatgtcaaagtgcttctcttgtcgtaggtatttagtaatgttttattagccagctattcagtgacagcattagagattcagctttgtttctcctaataactttgctagggccaataaatgtaagcttgacttttagcaactgttttactatatactgcaaatagagctgcttaaaaagcatattaacaaagccatttgtcaaatggatttgaaaggctttttaaaagtcaccaatgttaatgttttaaaaattgtggggtggagagaaacagtgttggaacagttcagcgttttgttttgagattaagtgcaactattgacaaggggattcctgaggtccatgcctcataaacactcagagtgctgtttaccagggtctctggtccctgccagaatataatctctgactaggtttgatctaaaaggaggattctatgcacctgtggcaactggcacttaggcggtgtcttggtgttaacagatttgaattcacatcttctgagcctcaaattgtactcagtgggcgaatacaggcatgcttttgctttggttccatagtatggtaagattaatattaagaaaatagaaggtataacttaattacctttttttctgggactgtgaagaaatccttattggagaagccctcagagctcatgtcacattcatcctctttcctgtccctcaccggattctctctcaatcaggtaggtgaacaatgaagaatcctgctgtgtgcttttagtgtagactgatcattgtctttctcatactgtttcagtatgtctgttttttctttattttccatgtattagtgtattccagatatttgattttatcccccttgtctctgattggggcatactagtgacttgtacatcatgaattaaaaccctttaacttctcattaatattgaaacccttagggctctctttttgagccaaataaattattcacattttcaacctggatagtttacacagagcaaatttaagggtgagagaaagcaaagaggaaaattaatttgactggaaaattgaaacaaaaagaaataaaagccttcaaaatttctcttcctaagaaaagcttaaggtgtaccaagcatccatgaacaagacattggattttctcaaatctctttccttggggtgagtttataacttcactgtcatgtctttcaggaaagatacccaaataatagtatgttcaatgaggtatatgggaaaaacctgacatccagctccaaagcagaactcagtccctcaatggccccccaggaaacatctctgtattccctttttgaagggactccgtggtctccatcacttcctgccagttcaggtattaactactctttaaattatagaccttacatttcctgtacactcagattgattaagggatagtgagattctgtaattacaaatatatcatttgttgggttatttttattttttgtttgtttgtttttgtaacttctgaaaggaaatagaaaaaaaaaaagaagaagccggtttatgtaataaatgctactgacaaaactttttacatcctcagtagccagcagagatgtaagggagaaaatagaggttctatcttatggttctcagctgctttttagttttatttgtaggtgttcattctttgcagaaaaattgcacttttttttttgagacagtgtcttgtggtgttgcccactctagactcaaactcctgggctcaagcagtccttccatctcagcctcccaagtagctgggactacaggtgcacaccactgtgcccagctctgcactttttaaaattgagatttttaacttagagtctgacttaatagtaattcttaaggttagcaaattctttctgatacataagaccaataaacatgtatctgaaatagccgtgtgagaatagggcattcattcagttgacaaaaattgcctactattttattttgcttttttaaggcgaagaatatgccttagatatgtgtggcagggcaaattagtgcatctagcagatctctttggagcctttagtttccctttccttcaaagccctgtggttattgttagtagaattttagtgatcagatctacaggaacctgtagttctttgtatgtttgtgaaacaatgatttactatatcctgtgttgctattatttaatagatcattcaacaccagccagccagtctcctcattcctctaacccaagcagcctacccagctctcctccaacacacaaccataattctgttccattctccaattttggacccattgggactccagataacagggatagaaggactgcagatcggtggaaaactgataagccaggtgagatctacatttcattgccaggcaaaattgaaagaatttactctatccttccctggggtctggcaattggcagtgatagaacatcttcttgaatttttcttatctcttttcatcccttagccatgggtgggtttggcattgattatctctcagcaacgtcatcctctgagagcagttggcatcaggccagcactccgagtggcacctggacaggccatggcccttccatggaggattcctctgctgtcctcatggaaagcctaaaggtgagtagatttcaggaacaagaaccacaagattattacagcaaaggtgtctctgctttcattcacataaatagctagacttctcaggccctcggagttgactgatacatagcacatatataacaaagtcctagaaacatggtctgccttacaagattcttgagtgataatttttaatttctgaattcactagtggtaaagcagtatcttcaggaggacaaaaacaaaggttttagtttcattctaaggttaagaaaattctgattcattttggaatgtttgatttaagccttttctgacaaaataagagtatctaattttagaaatgttttatttgcctgaaaactttatagtaaatgccctgtgtggtaccacatacagctgagtttcagtaaaaagacttgacataaaatgtgatttcacttcttctggtttaaaatagtcttaatggaaactaactagctttaagagtcttataatgactttttctaatagctggatttttatggggagtggggttgggttttggggccatatatatgcctttatatttggctgggattgaaaaatccctttcagacaacttggcatttgacctctgctgacaagatctggactgtttttcagtctatctggtccagttccatgatgcatcctggaccttctgctctggagcagctgttaatgcagcagaagcagaaacagcaacggggacaaggcaccatgaaccctccacactgaggccaaagtggcaacctgggaatgaaggctccataaaccatggcatgttgggtttgcaggactggcccacacagtcccctgcaggtggcagccctcttttctgtttctcgctgtcaagagggtgtaagtattccaccagcccgctgagtgtgcacgaaatgttcgcagtgcaacaaaaagaaaaatccatcaggaactctccgtccccccggggccctccggagggagagagagaggaactgctgtttatctcactcagttacttggtatcaccgcctctcaccttctccatcgtgcatgtccccagccacatgggaagtgaaagctgagaagggaaggcagatgggagaagccaatgggaacttctcagtccttttttcctctttggggaataaaataggaatccattaatgattgctttgctgactgagaatgtagttgaaattattcttaaacatcttttattattattactctcagtagtaaaatatcacactgaattcttccatacacaggtgtgcttctagtcagtgtgtagcaaggaaagccccgttcactgctcctgtgagaggttggtggtgacaggatggggaaccgacctcttcagccagtggaaatgttccataagggagagttcaaggcctgtcagaaggctctggtaggccttcctctggccaggagactccagcagggaatgcccttcactctgtaggtgctcgagccccaatcgaggatacagtgtgggtggtggtgctgggctggactagcaggtagactgctgtaggatttcaaattacgtttttgattcctgtacattttacagtcgcacagcaagcagtctcacagaaggcaggctagtccattcacagcctgacacgttctaataggtagaagctttcagtgtggttattttttctttggttggtttttgtgcccccattctacttcccaccctcctgccccatctccatcccttcttttacccaatgctgtatgctagtaattgtttttattcctaatgtgtgcaacatcacatctccccaagaagcaacagcatggggtccagcagttggggcccaaaagacagtctgaagaggaaggaagcagcagtatctgcgtagcccacagagggcccaggcccctgcccagctgcagtctcccagcctccactttcagagtgaaattcaaggcagcacggacatgtgcccatcaggcacagaagaaaacacgacgtcgtccattttggaagagacgaaagaaaggaaaataaactctttgtatgatatttattaggaggaaagaggactgaaaatgttcttgtgtagaaacagaaggacagcatttctgttagtcatttcctggaaaagtaatattttaaggggaaattatggaaacaatctaattgttcaattgctgtgctagtggtagggtttattttctgggaggtctctcctttgtgtgtctgtatgtttgtgtacacacacgtgcccatctgctgtcccagaggggaggggttgtgtgtgcgagtgtatggagttagtgtggaacttaagagctggaagacagctgtagagcaaagcacatccaggagccccagttgtcactgcagtctgggcaaccccagcaatgaaaaggggtgagataacgctcattgctcttcagagagagtggttggagccccccccgccccgtatgcttacattattgctcttttagtttgacatggtgtttgggttttgtttttttgaaaggtctgaaaaggtgaagccccctacccaatggcaatatgaaaccttttgtgcttctcttcagccccttccctgtgtccacctttctctcctcttcccaagcctttttcctactacctttacccagtttgtgtgtttgagctctgcattcaggcagctgcaacattccagtgtttgaactgtcactgattcttgcgccctagacaagctaaccaggtttaccatctcactcccagtaatacccagctcctatctaaagccccattctgcatgagaatttggtgtttggaatgttttctgactcttggggcgggattcctcgccttatcatcctcactgtggagtaatgagggggaggagaatctttatcagaaactggttttgtgtagtaaactttcttttgtggttttttgttttgttttctgggttttgttttttgtttttgtctgtgcaagacctgcagctgctgaaaatcagctttgcctttaattaaaccatgttctctccaaccaga

SEQ ID NO: 1148 - DNA, 25277 bp, Homo sapiens
cttagcttcttccaaaggagaccatctgaccacaattttctactactgcagaagcattgctgtgaagttccctttcccagctgcctccactaatctgcaaaaagcactttctaaagcactggaaaggtagggttgtttggttttttttttctctttccaagaggactttgtaacctggagccttaattcctcataatttggtttacagaaaataacggcctatgcttctcttatttctaaacatatagatttttcataatttgtgtatagtcactgaatttcatccaatcaatatctgattcagtcccagtaaaagagtacacaggctgttaatactgactcatcttgagtgtgttgcagttgaaaaatcagtcaaatacagctcttttgtgtatcaagtatttagcaagccagtgcctccttaaacagttgtagccaatttgctgcttatgattcatggaatttttttctttcatttcagccgagatgaggtgaaaaccaagtggggtgtttctgacttcatcaaggcctttattaaattccacggtcatgtgtacctgagtaagagcttggaaaagttgagccctcttcgagagaaattggaagaacagtttaaggttagatttcagaaatagagaatttttgtcttgtctaaatcaggaagcataacatttggaggaaactgactcccagtttttgtagttacttaactgtgtgaactattggtaaaaattatattcgaagtatgtgaaatctttgcatttatcatcccttcaatttaaactgaggtacagtctgtataaacaaatataatatagcagtgttttcacttgagtagttgccatttgacaaaaattatcaaagtggaaaaaaataaataactcctcagttttgaaactactactacttttgatggtttgtgtattcttagatatgattatgttacctgctttatagatattggcattctccaaaccaagttcattatttttattgtgcttgcattcatcaggattgtggtagtttgaatgaaaggaatgagagtttcatttaacagggatatattttactaatttgaagagataacattaaccttcattctatttatatatgtgaaaatgatcttttattagtatgttaagatattagcagtttaaatgtataatgcataaaataaggagaaagtcaaaagtattaactttttttcagttcatgtattcaaataaatatttgactactcatcggtcattgttttaggcactgtgttaaacagtaaatgacaatttcaaagaacattttatatttcttggttatttctaggtatctatatacttgggtaattgtgtataactgcttcatagtatttctgtaagttctttataagtcaggcattttaagagattgtagaacttggacagttaaggtgtcacttagccaaaaatagtcaatgcgaaatagtttttacaggtaatcgctttttggttgatactttctatgtgcaagatattagaatagataattataaatagcaatagtttgttttgttttaaaatatacttagcctgtgacatatgatgtataaggttgggtgtgtgaaaggaacagctaactttgtcatgtcctaggctgttcagcctggaaaagaacaaacaagtctaaatagttttcatagtaagtattcagacatgtgaaggattatttgaaaagaacatacctgtatctttcctgaagtcaaaactaaaatcttaaattttaagttgaaatctatagggggctgaccgtgggatgttgtggattctccattttggagagcttaacagtcagattgacagccatctttcttggattatttaagtgcagtcctactaaataggggattggactagaaaacttcttgagattgcttccagctctggttctgtgaaatactctctaaattggtggtggtgggtggtccctaccttaatgagatcttcactaactaagttattctagtctaaaaacctagtaagttttgcatttggttcaacctcaaacactaacactctcttcacatatatatttctgtatgtgaagttctggtaagtgtgggtgggcagtttctaaaatatactttgaagtatcattccagcactctaaagttaaacataaaacatagtatgaggcagatctatttgaaagcttacccagtgttgaactagaacattgctggagtgaaattttaacatagtggagtaaaatttccaaagtatttctaaagcatatgtagataattagtatcatcaacatgtatacttcagtgtttctaacaacctttagctactaagcagaaatgtttaccaagttgaggtccactaagggatttaaggcctgggatctgggaattgagatgtaatacattttctgtaagttaaatgtgggctgtttgttaatggtatttatttcagtatatttctcaactgtagttgaaagtttgagtagcaaaaatcttatcagttctaatctgactttattccttggaagactctctacaatataatctaaattttaggaaattacaactgaataacttcaaccttatttctgaatggataggttgttcattcactaagtgtttattaagtacccgctatgtaccatgcacttttctaggcttttagagatataggggaaaacatgacaaagtctggaccttcatgaacttatattatcatttgttagtactagggtgtattcatattcattaatacttctgtgcatacgctagaaaattctttaatgggctgtgaccctcttcagtaggatattgccttctaaaattaatgccagcggatttatagatacaggaaatacattaccatattgtgcttgtaagaaactgctttttgagaaatacaactacatattctcattttatgccagtattatttgaataaacgccagctgatttagaaggttagttgtagaaactgaaggagaaattttgtgggaaaattctagagaagagacaggatttcaggaaattttgaggaaagattaatgcttgatgtctttggaaaagggctaatcattctagacatatacaatgaaatagattgcaagaagactgacagtgtgatagaaagagttcatgtagaatggaattatattctctaatgataatgtaaaagacttccctcttagaatcgtagagcttactatggctatttcaggttctttatgtaaataaaaacaaaaatctcagagtagtctgggcagagacagctgtaagtttctgacatggtaggatctcctgtcactgctggtagaactgtaagtaaggattatctgttttccgccataatgctagtgataatgaatccctgctctctgcaaaaatttcccctgggcatagaggaagactggctatggctaaagtgtaggatgaaactaggaacttctgttagaaaagtatttttgcctgcaggtaatctaaaataattgcagatattaaagtagaagggtaattccattgagacaccaactgagagcatctgggtgattttttatagtgctggttaacagatcactgtgaacacagttattagaaggtaaatgaaatttgatgatcacgcatgtacttctctaagaggggaaaataccagttgataatttgtagaagtacctataatacatcctaatgttgttttagtatgccatttaccctgtgttccagaatatgtacttgctatgccttgtttataaaataagttttaatgtatcaagcctctgaaagagtaaattttatgacaaatctgggaagtcatgctttatgtactgggagttcaaaaaattattttttgagtctgttgctttctagtcatttgtcccaacttaatattttaatatgtatacatcttgtataaaacaatttctaaaggattaagttgtataaatttatggatgaacactcaaagacttttgtcaggtcatatttaaaaatatatagtttcctaggagaaaaaagtttgttgataaacaattcaaacaactctgtggtgtctagattaattcctttcaagacaaaaagtcagtttgggaaataattagacccagtcaaaatactgggattgagggcagaaccatttactcatctgtaattctattacacatggtggttctaaatgcagactaccagtttaatttcttgtgtcaaagatggttcctgttcttgataatatatgcagtacgtctgtcttcttttacagaggctgctattccaaaaagctttcaactctcagcagttagttcatgtcactgtcattaacctgtttcaacttcatcaccttcgtgactttagcaatgaaaccgagcagcacacttatagccaagatgagcagctatgttggacacagttgctggccctctttagtgagtattgaattacttaacatgtgccatcttttttgaaaaacatcatcttaggcatttcatcgatgtagcaaagcacagtgacataaaaaagcatagtgtatttcttacactgaatcaggagttcataataactttcaaccccaagttctatccttttatctgctgataccccctcatcaagttgtaactataacatttttaatatgggaaagaaagcgtctttttagaaagaagctgtaagatactcaagtgttaaacagaatatagtagaaggcacataatattttaatttgaactggcacagtttcatatttcttatgctttttgaatacatttttttttcaagtgtcttttcttggcatcctgtgcaagtgtcctctacagaatgagtctcaggaggagtcctacaatgcctatcctcttccagcagtcaaggtctccatggactggctaagactcagacccagggtctttcaggaggcagtggtggatgaaagacagtagtaagtatttttagaatttcatgttaacttgtgtgctttgtttgtttgatatccataaatatgtaaaaactgccttctaaaatacaacatttgaacaatagaatactgtattttctgccgactctcgggaattgaactgaagacctctttgtacgcttttcatttgtttatttgaattcttcatgtgaggcttagtcttaaggatttgtgactccttgtacactcccttgttcccagttgctgtcctggggaaaaggcatttttcacatttcaaagtgaacttgaagtaaaaccagtttgtttcttatctattacagtattccttaattttttgtttgagttgaagggaagagatttttattccatttttttctgtacatgaactgtttgatgttgccttacagtaacactcaatttgaataatatttgtttatttgaagcataaagattgaaagttattttgattctcaccattttctctgtcatctctactcacagtaattctgacagctcttaggaaccattgattttacaatgacaaatgaaaactttcagtgtacctttgattatagaaataaatacttccaaggtggcttggcaccaaataggaagttcctcccctgcatattttgatggtatatttaaggagaatctctttgaaagttttgctttgtggcccagcatgtatattgaccaaggtcacaacttagaaaatgccttttttaagccacatttaagaccctgtgggccaagcactgtggctcatgcctgtaatcccagcacttggggaggctgaggcaggcggatcacttgaggtcaggagtttgagaccagcctggccaacatggtgaaaccccatctcttttactaaaaatacaaaagatattagccaggcattgtggcatatgcctgtaatcccaccacttcgggaggctgagacaggaaaatcgcttgaacccaggaagcagaggttgcggtgagctgagatcgcgccattgtactccagcctgtctcaaaaaaaaaaaaagaaagaccttatggtctgtctgcttcataattgtcttttctctcatgtagttataagctctttccatgatatattgacattatcatgaatagagtttaggaacatagcacagcatactatatacatctccttttaatgttagcattggttttagtaatacggattttcagacattgcttccttgcataaaatttttatttcttaactcaggctatacagtttttctactcttgtgtactctagaactcaaatttatgtttaattcaatatattatatcagtaatgttacaaaagaagaactgcatgttttaccatttgcttatagagtttttatatttatgggtaggaattgttattttcattgtgttttgttttttcttattgttgttcttgtacagtgatccttttggcccattctgtgtgttcccatttcttctcatggcaaaagatgttgaaccagaaggaacagctttattggcaaacattttttccctccatttttttctgtcatttactctttccacttcctcctatcagatttaccaaaatctttagaattatgcccttgtaggtgtttgattctgtgttaaattatgttagtactcattttaaagactagcatgggatatcactttaaaactgaagatttttccttgtgtgtctaatacactaaagttataatgttcatttatatcttttaagtaatggaaaaacaatgactgtttcttttgtgaactcagaattttatgtatattcaaataatcttcagtttcttatatctgggccttctcaatttctagaatttactttcccttgtacttttttgagaacatactctcttaagctaatgaatacatggaatagtgattttcctttgtagaaaatagttatagggtaaagcagtatatcattaggtaatccactcatgcgctttttctacagtgttttctcgagagcttatgtgtgttgcatgaagacattgtacagtatagtattctcttttagtttactgacctttttttccaactatctcttgtaatctgttacatctccaaaggtttgtagcagacgtttattcttcaatatttgtttatatatttttaatatgtgtatatatttgttgatatttttaaagtagcatattcccatatttcagagtgtacaactgtcccaaatagttaacttacaattttccgtagtgtgattatttacgtccagtttctctatcctgggcacttcacctcatgcttttctttttctttctttcttttttaataaaaattggttgatacatattcagaggtaagcttcatattaaggagaatgtgattagacagatgagtctactgtaggaaaatcaaagtaattgtttccaggccaaaaccaattattttaagctaattactttaaccaaataattttaagcaacatggctacttccacccatcacatctattcctcaccccagcaaatgaacactcaaactacttggatttgtctcacttcaaaaatcttgccctgtcatatataatacatcagatttataaattgctcttatgtttgaaagataacagagattttgatacaaatgtttatatgtaaagtgatatttataaatctgtatccataatggaaactttaacatacctcactcaggaaccaaggacacagttaacaaatacatatatagtacgtacttctgaatagtggaaagaatatgttctaatatttcatgtgtaagctttcacaaaaattgtgtattaagaaacagagtttagagttaaggcttttgtaaaaatgtggactttttgtaccataaaaaaagaggcattatcactttgaacagggaatgtgatttgtgtggtataaccataccctgtcacagattaaagaactaacagcggcttccacaactcataatgtatgtgaaagctctataaaaacatagtatgttatttctttgctcagaattttctcagcctatttcagttttccatgtttaaaactgacaaattattttcaccatttgttgaattaggagcatgggaaatgatctacagtggtagtaggtctctgtcatggaaatttgtcccttttgttgtatctttatcattatctagtgtatctttgaaagtacatttttaaaaattatacagcctttgaaatgctgaaataagggaaaaatacataaagtccaggacctatagataccattttcatggcttattagtgttctggtttctcttacataaaaataaagtctgaactctttctttaatttacagcatttggccctggttgatttctcttctgaatagtttccatccccatgaagaggacctctcaagtattagtggtaagggctaccctaaccttgtgttgttgatgtggttctccatcattaatggtggcttaatgccagagaaaaagaggtttttggtgatgaatgattgattttaaattcagtatctcagaagtgactgtgaactctacataagtgggtgggtggaagtagataatgttctcccagttcttctggcagcttattctcatttagcatcattcaaataggagttcagagagtgtaataccttcagattctttcattccttcctcctcattcttactattttaaaaaaagcaattaacatgaacattgctctgtcaaagtaatacttactcatcgtagaaaatttggtacaaagaaaaagaacacaaatctcccatacagagataccttttactagtcacgatagtatatcttcttcgggcctttttcttacgtgtgtacacacacacaggaaatgattcatatcaaataaagttttgtgcctgattttgaaatttagtattatattgttagcattttcttttgtcattaagcattttgaaaacatgacttttactggcttcataatattccatcctatggaagtgctataatctatttacgcactttctgttgctttaaaattttccccattataaataaataatgctgcactgaacaacctctggcttggcttctttctgactttttttttcctcttaaatccatgctcctcaggcattaatttgcacataaatcacctgaatctttttaaaatacagtttatgattcagtaggtttgaattagtgcccaagattctgcatttcttacaagctctcagatgatgtcaatgttattcaatactttcagtaaaaagagacaggtaatctaaacattgggcttactggatccaagactatgaatttttaagactgctgattttttaaaaagccattctcctcagcattgagtattaggtgagtgttaggggaatgtctgtgtcccaaagataacatgcagagttttgacaggtgagttattttcatcaggatcatgataaagaagagcagagaacaataagcattataatttctttctgtatgttaatttttaaaaaaatttagtgaacagtattccaccaaacaacattttaattaaaatgtttgcaaattttgattttgaccctttagcgacaccacttccagaggagtttgaattacaaggatttttggcattgagaccttctttcaggtaggtgatagctgaagtacctttatcattgccagtgattgcagtattaaaattagcagagaattgggcttggatgtagaggaacctttgatctgtcccagctgtgtgttatttttgtaacgtcaactaatactgaaagttgttgtgaattggatttgtgtatgtcacgccttcaattcctgtgtaataaaaattaaaatgtaacctttccatctgtgcccttgatcccatcccttctcacctccctaagaaccttgctccatctgttatcctctctgcattgtatttccagtgtcttgtctttctttcctttcttttttaaacaactaattatctttagcctagtaacatttaagtgtgccccattcttttaaaaaggtaaaatgaatttacatccctctattttcctacgttgccttatcttttcatcatcaaacttcttaaaaagagtagtatgcactttgggaggcggaggcaggtgaatcatgaggtcaggagatcgagaccatcctggctaacccggtgaaaccccgtctctactaaaaatacaaaaaaaaaaattagccgggcatggtggcgggtgcctatagtcccagctacccaggaagctgaggcaggagaatcgcttgaacccaggaggcagaggctgcagtgagctgagagatcacgccactgcactccagcctgggtgacagagtgagactccgtctcaaaaaaaaaagagtagcgtgggccaacctgactgactccacttcaactcctgatcattttcagcctactgtggtttaaactatcagtgccttctagataccaaaatccagtgactatagtctttatcctattgaattttcttcagcattgagtccgtcgatttccttccttcatgaaacctttttccttagctctgtgatgcaatttttcccacccttagcactcagtctttttcactatttcttttaaactacatgcctctgaatgttgttgttttccaggattcttttcttgccctttccttctcactttgtacattcaccctgttaatcaaatccatccctatgtctcttgaatggtatgtcccaaattttcagctttgacttctcttgaagtttggatgcatattctaacaatctgacctcccttacgcattttaaactttaacgtgaccaaaaactgagcttatattttccgatttggtcagccaaaaagcaatcttctttctctattttctgtctgtgcctgtggcattacccatctatatgaccaagctagaaatctgaaaaacccttgtttctatttgtctttctcaccaagcctttataattatgtgtctgaaatgcttcttaggttcaagtccttccgtttatttccctatacatagttcaggcttttctcaccagtttacctgaagtataaaaaccttcctacgtatagttcttctcctcctatagtctgtttctacactgcctatagtttttaagtatggaaatagtgatgttgcatgactaatatttttatttacccattcccagttgctccactgtctcttttagcttgatgctcaagttccagcactatccagctcctagttgttcagccttattttcttccatttcccccagtatttataaactctatacactatgtgctatacttgaatagctcactatttttattcctccacacctttgttcatgttgtgcctagaacatttccttctcctctactgcccttccatcaccagcctggtaagcacttagccatacctgtcaaggtccagctcaggtatcactctatgaaacctttcagagcttctcagaaggaactcatcctccttttactatattcacttaattctttacatagttcttattatgcttatcagattgaatcataattatttattcccaaaggtagggactcttatttatctttgtgtcctcagcatctagccttctgcctggcaattcttaaatcttcttaaaaaaaaaaaaagtttaataaggagaaatctgaaaaatctttattttttcaggttggtttacccttctgatatcaatgagttattctatatgctttacgatatttatacatttttctgatttagaatggtccaccacaaagtggatagattaatattatttattaaaataggcacctcagagactcttagcattgccatggtcatttcaagcaaattacttggcatgcaagataaatgtttataaaactttattcttaaaatgataaaagaatctttcctaataaaaagttgtggtttatttgagctccctgactagaaagtgaaatgtgagtaaaaatattacattaatgtaatgaatttgtatattttcttttctgctttgtttcatagtttgtaaaaatctctggtagtataaattctaataaatgcagttgattacatcaagtagctaacctatgtgggaagtaatctgaagccattacagttaatcaggtgaacttggttgcctggaaaatatctttagcaatttaatattctcataacttgcttgtgtcaattttaggaacttggatttttccaaaggtcaccagggtattacaggggacaaagaaggccagcaacgacgaatacgacagcaacgcttgatctctataggcaaatggattgctgataatcagccaaggtaagtctggaacttctggtctacccctttttaaccacctttttagataaacacatgcgcgcacacgcgcgcgcacacacacacatctcatatgttacgtattttaggctttggtataaatattgtcaatcatgaactcttaaatcgacatgttggtagcacaacatctaattataaccctagtgagtaagtatactctttatttagaatctctgttctccctattgtgtattacagaggtctttcttgtttatcgtgagtttctgctctaatttataaatatctctgtaaatctaactgaactgtactttcacagtcatggtaatttgtattggcctgggcatggtagtcagtttcaggcaggacagaccaagatcgtgctagtagccagttaagtacaaagcagatgtggtcgttagtgtagggaaaagaacgcaggttttgtaattccattggtttgagttccgtttcgagttccgcagcttctcaagtgggtgtccttgggatctccccagtagattataacctttccaaagtcactaactacttcctcatttttgtattcaggtttctgtcatacagtaggtagttaaatgcttccatgtttgaatgaacttaccacctccaagcttcaattttcacatctatagaataggaattatatatagctaccttataggacatatcaagggccctagaccagtgtcttgcacttgaagcatgctcagaaaatgtaaattctagcaaacgttgaaagagccagagggataggttgtgacgatgttaagtgtgataatgagaacctcagtttctacataactactttttgtgttacctgaatccacattgttatatcctgctgttttcatggttattagtgctaggaatatattgacttggatccacacacaattcagttgttattttttaagttaatgttttttatatatggatttatttttgcttttttaggctgattcagtgtgaaaatgaggtagggaaattgttgtttatcacagaaatcccagaattaatactggaagaccccagtgaagccaaagagaacctcattctgcaagaaacatctgtgatagagtcgctggctgcagatgggagcccagggctaaaatcagtgctatctacaagccgaaatttaagcaacaactgtgacacaggagagaagccagtggttaccttcaaagaaaacattaagacacgagaagtgaacagagaccaaggaagaagttttcctcccaaagaggtgagaagggactatagcaaaggaataactgtaactaagaatgatggaaagaaggacaacaacaagaggaaaactgaaaccaagaaatgcaccttagaaaagttacaggaaacaggaaagcagaatgtggcagtgcaggtaagctgtatttgaactataaagcaggtagaggaaggctcacacaaaaggcaagatttttcattttgttctaaagccatgagaattggccgtcctggaagtttaaatgcattatttaattgcatagtaaggttatataaagagctgtgatagatggttactttttcaattcttgggaattgtgagtgaaaaaaaaatctcagcctgatttgacactttcgtcagtcttcaccaatttaagcagtttgaaaggattagttgcagagttgtcagtttcacacaggattatattttatttagaagatataactaccatttgtcaatgctatagtggagatttggggtcttctgtagatccagtagaaccaagagtatattaaggcttatgcagtttttttttttagattcactataatatatatatatgtgtgtgtgtgtgtgtgtgtgtgtgtgtgtgtgtgtgtgtgtattttttttcttggaaaaatatgagacttttttattgacaattatacttgtcccggctattggtattaatatcactttaatcttatcctggatcctgggaatttataaaggaagaacccaggtttcttgctgggaaaagataagcactgctcagttatttgtgactttctttttattaatatattttcccaaatagaaaagatggtttcatgtaaacagaaaagggcctttattctgtgatggttttattaatactattaatgtttgaataaatacttaagcagccatgtgagttgttaacacattttagcaaatgtatgtgtttgcatgagaaactttacattgttgaaggctgcttacaaataaatagtacctttgaagtatttctctaatttttttgagaaagagaaataagaaaataatagttccattttaacattatagcaaggagagaaacagaaagacaaggtagaaattaagacataggggagagagagagatgctagggaaaggcaagaaaaaaaaaaatgaactagaaagccaaaggatccgagttttagagataatgagtccagcattttctgtttacctttcctccattctctgtaactgctcacaataaggtccagactgaaaatacaatctccttttttggtttctcatccatctcaaatcacctataaatgattaaagaaagaaagagtaaacatatcaccacactctgtacctcgtcctgggttttctataaatgctactcatgttccctcattttgctcaactttgagcagtgcatatgacatctactctctggctccatctataggatctcagggcctgttccttactgctgaaagtatccttatttattctgaagggtggtaaagttgcagggtggaaggtggatgcctgactgcacatatggctacccagatgaaatcaaactgagggccaaaataactcacctatgggttaatagtcattattagttcataattcatgtatgtcgtttaatgaattagagtatagagaaccctgggccccagaacaagcaacttaaagtcatagacaagtttttttcaacttgttagcatcaggcatctcatttgtaaaacaaatgggctctaaggtcctttacatttttggatttttgtgatcatgggaaagcaaaataattagtaaaactaagatagtaaaattatcttttattggctattaaataatttgctttgattttccatttttaacttaggtgaatttaaatatcttcagcatgtactttttgatctaatgaggttttaaatactttcttaggagtagggtcttctttctagcacatttgagtttcaatttattatagatagttttgcttctattggttacaggtaaaatcccagacagaactaagaaagactccagtgtctgaagccagaaaaacacctgtaactcaaaccccaactcaagcaagtaactcccagttcatccccattcatcaccctggagccttccctcctcttcccagcaggccaggtaaatatgttttgtaatttcttctacttaatcttttctgtgcaagaatttctattcagtcactgagaaatgtgttttctgttggagtaatgttactaagccataaaaagttctattttccctaatacttataaaattatttttgaactgtttgtgtgtagtgtacatacaagtgcatgtttgttattatgaaggaaatcctatcactaaatacagaagctactcacagaacactgattacttcagtggatagaggaaaaatatcaagtctatttttagttcttcaaatcaagttaaagattgacaacatgactaatctcttttgtgatgtgttagaagactccctctacctacctgttaaaaaaaaaatgactttttttgcaattttttgctgtttccttaaaactaaagctgtgttcttctgttttgaagggtttccgcccccaacatatgttatccccccgcctgtggcattttctatgggctcaggttacaccttcccagctggtgtttctgtcccaggaacctttcttcagcctacagctcactctccagcaggaaaccaggtgcaagctgggaaacagtcccacattccttacagccagcaacggccctctggaccagggccaatgaaccagggacctcaacaatcacagccaccttcccagcaaccccttacatctttaccagctcagccaacagcacagtctacaagccagctgcaggttcaagctctaactcagcaacaacaatcccctacaaaagctgtgccggctttggggaaaagcccgcctcaccactctggattccagcaggtaagttacagttgtgtgtactatccagctgaatgaaataaggggaaatgctgaaagattcaatgttagaaatgctcattaaactttgacatacttcttgcttagatttatagtgattatgggaaaacaaaagtattgtctctactgtttatgaaagttcaaatgttttccttactcttgtaaaggataaaatactagatcttaagtaccattcttggctgctactaagtgtccattttattgaaaatggattttctgcaaataattctcctataggaacataaactactagggaaatagaatcacagtcttgatgaggtgctaagacagatgtgacaccaatcttaaatgttgtcgttggaagcacagcacttgaagcagaaaggggaaacaaacactcttatgcaaatatattcattcattcattaaacctcttaaatagttgaattaaaagaaaatatgagtgtggtgcccataatctgtttccaaaaagctctgagtattgaatagcccaaaaggtaaaggaaactgctgccttgcctagagttttgttggttggaaaacaccccaagttcattctgtgattctttagcattcattataagtaatattgcattttatcctcacctttatgacaggcgtctcttttttagtatcaacaggcagatgcctccaaacagctgtggaatccccctcaggttcaaggcccattagggaaaattatgcctgtgaaacagccctactaccttcagacccaagaccccataaaactgtttgagccgtcattgcaacctcctgtaatgcagcagcagcctctagaaaaaaaaatgaagccttttcccatggagccatataaccataatccctcagaagtcaaggtcccagaattctactgggattcttcctacagcatggctgataacagatctgtaatggcacagcaagcaaacatagaccgcaggggcaaacggtcaccaggagtcttccgtccagagcaggatcctgtacccagaatgccgtttgaggtgtgtgttctttcctatcaccaggcaatttggagataggtctgaggttgactgtcttttgaatatctcaaatagatcttataaaaaggccactcttattcgttagtactatagaatgccactgagtattggtgtagctcttggtttcctcctcagagttgcacagtatgttttagtttggaagctgaagaattccgtaactgattttgaactctgatggtctggcaaagaaaccatgtacagaaatctctaaaacagcatgttagagaattctgagacaaagcactcctctcagttgggctgaatcatctaagtttaaaaataggtttactgatatttaaataaattgctctctgagaggaacaaggttagccagttatcttggacagtggaggtccctttctttgccctttttattcatgagaaacaggtgaatgttagtaactttttaaaagatctgtttctctgttagcacaagatatgctaatcattttgctccatagcattgttttactcactagccacattaaccttttgtgttctgctctgtcagtatttttgcttttctattgtcttgaactttctccattattgtccttgtgtcgctttgcctttgcatttcagagcgttttttctctttgcctaataccatctatctcactatccccttgactttagttgtcttcttccacctaattatgctactattcctttatgcttttgttatcccttattgcttctcactgtgatgctttctgtcactaggaccccaagagctcccctctgcttcctccggacctgttaaagagtctggctgccttggaggaagaggaagagctgattttttctaaccctcctgatctttacccggctctgctggggcctctcgcctctcttcctggacgaagcctttttgtatgtatttgacataattctgcttcttggtctaacccccagctgcttctctgagatactgtagtacacagattaggtgatttcttctcttcctggggctgtccttttcagaactgtaaaacatattttctaattgcctaaaccaaccttaagttggtagtaggatatagcaaaacatttctgcctttatagttctcccaaatcatggagacataccttggttttatgtgttatccagaaagcattctgcagagctggtcacacacacgatgtgatggtgacaaattaactcactttgcaggtgacacttccatctggacccagaaattttaagtatcatttaatcttgcttaggaacagtgagatttatttctcatatgtagccaaaatatgaaaggaaatatgttcttgattttttttttgactgacattactgaacagtatatggctcttttttgtttggttaactaaatgcagaaagagccctgatctaaattcaaagttggattcataaacagaatgagtaaaaatgaagaggattctatttataaacattgtcagagtgtcataaatgagtaaatatgaaaataactagaatcacataaaataaaatctgagaactcagcctgcatttcaaagaacatcattctatatgcttgtcagtgttcatattatattttactgtgggtggggagtataaaagatggaaagaaagatgtatgctatgaggctttttcccctctctttattacaccttaataaaacataaaaagatagtaaattttactttcttgctgtttctttctcataaacacagggcaagaacacattcgtaaaattaaagtacattaattttagtgtcaagagaaataaaaccttaacagctttcatgacattgctgccatccctggcacttgaagttcccttaagaatttgcctgggtagtagcagtaggggccccataccaagttattaaataatagcaataaaagatccccctggagacttaaatggtagcagtgccatggctgagcgcacagggattgtggaagctcagctgctatactgttgcctctctatgtttgcctttcttgtggcttttatgctagagtggctttaaggactgagggtagtgcttctctgtccacttgtttcctaatcccttagttcctgttcctgttcccttagtgtccctttcattggaaatggagctgatggtagaacaagtgggagtattttcagggtttttttttcatgtttaaaagacaacaatgaataaaaaaaacttcgactataacccttccaatatttaacattaatgatacaacgtatgtcaaagtgcttctcttgtcgtaggtatttagtaatgttttattagccagctattcagtgacagcattagagattcagctttgtttctcctaataactttgctagggccaataaatgtaagcttgacttttagcaactgttttactatatactgcaaatagagctgcttaaaaagcatattaacaaagccatttgtcaaatggatttgaaaggctttttaaaagtcaccaatgttaatgttttaaaaattgtggggtggagagaaacagtgttggaacagttcagcattttgttttgagattaagtgcaactattgacaaggggattcctgaggtccatgcctcataaacactcagagtgctgtttaccagggtctctggtccctgccagaatataatctctgactaggtttgatctaaaaggaggattctatgcacctgtggcaactggcacttaggcggtgtcttggtgttaacagatttgaattcacatcttctgagcctcaaattgtactcagtgggcgaatacaggcatgcttttgctttggttccatagtatggtaagattaatattaagaaaatagaaggtataacttaattacctttttttctgggactgtgaagaaatccttattggagaagccctcagagctcatgtcacattcatcctctttcctgtccctcaccggattctctctcaatcaggtaggtgaacaatgaagaatcctgctgtgtgcttttagtgtagactgatcattgtctttctcatactgtttcagtatgtctgttttttctttattttccatgtattagtgtattccagatatttgattttatcccccttgtctctgattggggcatactagtgacttgtacatcatgaattaaaaccctttaacttctcattaatattgaaacccttagggctctctttttgagccaaataaattattcacattttcaacctggatagtttacacagagcaaatttaagggtgagagaaagcaaagaggaaaattaatttgactggaaaattgaaacaaaaagaaataaaagccttcaaaatttctcttcctaagaaaagcttaaggtgtaccaagcatccatgaacaagacattggattttctcaaatctctttccttggggtgagtttataacttcactgtcatgtctttcaggaaagatacccaaataatagtatgttcaatgaggtatatgggaaaaacctgacatccagctccaaagcagaactcagtccctcaatggccccccaggaaacatctctgtattccctttttgaagggactccgtggtctccatcacttcctgccagttcaggtattaactactctttaaattatagaccttacatttcctgtacactcagattgattaagggatagtgagattctgtaattacaaatatatcatttgttgggttatttttattttttgtttgtttgtttttgtaacttctgaaaggaaatagaaaaaaaaaaagaagaagccggtttatgtaataaatgctactgacaaaactttttacatcctcagtagccagcagagatgtaagggagaaaatagaggttctatcttatggttctcagctgctttttagttttatttgtaggtgttcattctttgcagaaaaattgcacttttttttttgagacagtgtcttgtggtgttgcccactctagactcaaactcctgggctcaagcagtccttccatctcagcctcccaagtagctgggactacaggtgcacaccactgtgcccagctctgcactttttaaaattgagatttttaacttagagtctgacttaatagtaattcttaaggttagcaaattctttctgatacataagaccaataaacatgtatctgaaatagccgtgtgagaatagggcattcattcagttgacaaaaattgcctactattttattttgcttttttaaggcgaagaatatgccttagatatgtgtggcagggcaaattagtgcatctagcagatctctttggagcctttagtttccctttccttcaaagccctgtggttattgttagtagaattttagtgatcagatctacaggaacctgtagttctttgtatgtttgtgaaacaatgatttactatatcctgtgttgctattatttaatagatcattcaacaccagccagccagtctcctcattcctctaacccaagcagcctacccagctctcctccaacacacaaccataattctgttccattctccaattttggacccattgggactccagataacagggatagaaggactgcagatcggtggaaaactgataagccaggtgagatctacatttcattgccaggcaaaattgaaagaatttactctatccttccctggggtctggcaattggcagtgatagaacatcttcttgaatttttcttatctcttttcatcccttagccatgggtgggtttggcattgattatctctcagcaacgtcatcctctgagagcagttggcatcaggccagcactccgagtggcacctggacaggccatggcccttccatggaggattcctctgctgtcctcatggaaagcctaaaggtgagtagatttcaggaacaagaaccacaagattattacagcaaaggtgtctctgctttcattcacataaatagctagacttctcaggccctcggagttgactgatacatagcacatatataacaaagtcctagaaacatggtctgccttacaagattcttgagtgataatttttaatttctgaattcactagtggtaaagcagtatcttcaggaggacaaaaacaaaggttttagtttcattctaaggttaagaaaattctgattcattttggaatgtttgatttaagccttttctgacaaaataagagtatctaattttagaaatgttttatttgcctgaaaactttatagtaaatgccctgtgtggtaccacatacagctgagtttcagtaaaaagacttgacataaaatgtgatttcacttcttctggtttaaaatagtcttaatggaaactaactagctttaagagtcttataatgactttttctaatagctggatttttatggggagtggggttgggttttggggccatatatatgcctttatatttggctgggattgaaaaatccctttcagacaacttggcatttgacctctgctgacaagatctggactgtttttcagtctatctggtccagttccatgatgcatcctggaccttctgctctggagcagctgttaatgcagcagaagcagaaacagcaacggggacaaggcaccatgaaccctccacactgaggccaaagtggcaacctgggaatgaaggctccataaaccatggcatgttgggtttgcaggactggcccacacagtcccctgcaggtggcagccctcttttctgtttctcgctgtcaagagggtgtaagtattccaccagcccgctgagtgtgcacgaaatgttcgcagtgcaacaaaaagaaaaatccatcaggaactctccgtccccccggggccctccggagggagagagagaggaactgctgtttatctcactcagttacttggtatcaccgcctctcaccttctccatcgtgcatgtccccagccacatgggaagtgaaagctgagaagggaaggcagatgggagaagccaatgggaacttctcagtccttttttcctctttggggaataaaataggaatccattaatgattgctttgctgactgagaatgtagttgaaattattcttaaacatcttttattattattactctcagtagtaaaatatcacactgaattcttccatacacaggtgtgcttctagtcagtgtgtagcaaggaaagccccgttcactgctcctgtgagaggttggtggtgacaggatggggaaccgacctcttcagccagtggaaatgttccataagggagagttcaaggcctgtcagaaggctctggtaggccttcctctggccaggagactccagcagggaatgcccttcactctgtaggtgctcgagccccaatcgaggatacagtgtgggtggtggtgctgggctggactagcaggtagactgctgtaggatttcaaattacgtttttgattcctgtacattttacagtcgcacagcaagcagtctcacagaaggcaggctagtccattcacagcctgacacgttctaataggtagaagctttcagtgtggttattttttctttggttggtttttgtgcccccattctacttcccaccctcctgccccatctccatcccttcttttacccaatgctgtatgctagtaattgtttttattcctaatgtgtgcaacatcacatctccccaagaagcaacagcatggggtccagcagttggggcccaaaagacagtctgaagaggaaggaagcagcagtatctgcgtagcccacagagggcccaggcccctgcccagctgcagtctcccagcctccactttcagagtgaaattcaaggcagcacggacatgtgcccatcaggcacagaagaaaacacgacgtcgtccattttggaagagacgaaagaaaggaaaataaactctttgtatgatatttattaggaggaaagaggactgaaaatgttcttgtgtagaaacagaaggacagcatttctgttagtcatttcctggaaaagtaatattttaaggggaaattatggaaacaatctaattgttcaattgctgtgctagtggtagggtttattttctgggaggtctctcctttgtgtgtctgtatgtttgtgtacacacacgtgcccatctgctgtcccagaggggaggggttgtgtgtgcgagtgtatggagttagtgtggaacttaagagctggaagacagctgtagagcaaagcacatccaggagccccagttgtcactgcagtctgggcaaccccagcaatgaaaaggggtgagataacgctcattgctcttcagagagagtggttggagccccccccgccccgtatgcttacattattgctcttttagtttgacatggtgtttgggttttgtttttttgaaaggtctgaaaaggtgaagccccctacccaatggcaatatgaaaccttttgtgcttctcttcagccccttccctgtgtccacctttctctcctcttcccaagcctttttcctactacctttacccagtttgtgtgtttgagctctgcattcaggcagctgcaacattccagtgtttgaactgtcactgattcttgcgccctagacaagctaaccaggtttaccatctcactcccagtaatacccagctcctatctaaagccccattctgcatgagaatttggtgtttggaatgttttctgactcttggggcgggattcctcgccttatcatcctcactgtggagtaatgagggggaggagaatctttatcagaaactggttttgtgtagtaaactttcttttgtggttttttgttttgttttctgggttttgttttttgtttttgtctgtgcaagacctgcagctgctgaaaatcagctttgcctttaattaaaccatgttctctccaaccaga

SEQ ID NO: 1149 - DNA, 567 bp, Homo sapiens
aatagtttagttagttacagaatccttcacccaagttaatcctgaaaaattggacaattgggttagccaaatccatagcattctgttatgtatattagtatagcatagtatatgcagtcatttaccatataacaatgttttggtcaacaatggactgcatatacaatgatgctcccataagattataatacatttttgctgaccttctctatgtttgtttacactgatgatacttacttaccattgtggtatagttgcctgcagaattcaacatagtaacatgctgtacaggtttgtagcctaggagtagtaggctatacctggtaacctagctgtgtagtaggctataccatctagtcttgtgtaagtgcactctagatgagtttgcacaacacgtttctcagatcatgtctccattgtgaagcagtgcataactgtattacgaagtgtcagctaacaagatactacttacgaactagcttcatgaacaccgctgcttttcatcacttaaatgttggcgattgatatatattcagtattgagttcttaacacatgttcctctctga

SEQ ID NO: 1150 - DNA, 567 bp, Homo sapiens; identical to SEQ ID NO: 1149

SEQ ID NO: 1151 - DNA, 508 bp, Homo sapiens
gccaggctggtctcgaactcctgatctcaggttatccacccgcctcagcctctccaagtgctgggattacaagtgtgagccaccgcaccccgccctaatctcagcctttttatatcttcttggtaggcccactttttggcatcccctaacaagaagtcctcagagatttttactactcaacatgtgtgcgtcccactcagatgtattgtgttctttctgttcaccctctacttcccattccatttcttcctctgacttagggttagaatggcccaatgatcctacaactttttgatgctatttcatttgattcctctactgtctaaatcacaagttggctaactttacttactgtaagggatcagatagcaaatagtttaggccttgtgggccattcaatctgtcataactacccactctgaccatatgtagtgcaaaagcagcccttgacaatatataaatgaatgaacgtgaatgtatttcaataaagctttacttgtggacactg

SEQ ID NO: 1152 - DNA, 145 bp, Homo sapiens
gagctggagtctcactctgttgcccaggctggagtgcagtggcacgatctcagctcactgcaagctccgcctcccggattcaagcgattctcctgcctcagcctcccgagtagctgggactacaggtgcgtgccaccacgcccag

SEQ ID NO: 1153 - DNA, 122 bp, Homo sapiens
ggatcacctgaggtcgggagtttgagaccagcctgaccaacatggagaaaccccatctctactaaaaatacaaaattagctgggcgtggtggtgcacgcctgtaatcccagctgctcgggag

SEQ ID NO: 1154 - DNA, 2935 bp, Homo sapiens
catttaagtattatccctttgtcctaggacccacgcttttctaagatcctggaaaacctaagactccagaagcgtggcacaggtggtgtggacactgccgcggtcgcagatgtgtacgacatttccaacatagatagaattggtcgatcagaggtaacgtctctctcactttcctaacatgaactaacaaaatcagcctaagagagaatagagaaaagcaaacagcctagccgttttcacaaaattcgagacctcctcttcgcccattgagtcctgagttatgttagcttttcattctgtaacattattcttccatgggaaataactgcataaagggaaacataatgtgagctgagaatttataggcaagtataggaattcacagtgggactgttgtcaccgacctgccatgagagctattccaacaatcctcagcgagcaggagctctgttatgctaaaggactgcagtttttttattactgtaaagtcagaacatctatgctatccctctgagggtggcaaaatagtggaattttctcttggttctgaattttctttggtgaaggctacaaatgatcatcttcactttggtgttcttagatactcgatggtttctaaacttttatttcttaggctaaagatagcaactatgttatgtgctaggtttagataagtttgtgctcataaaatccttaggattctgtgatgaatatgtaggatgaaaaggattcatagactttgtgtggcctgaaacaatgaatgaggcaaaaagatcacatgtaaggaacatgcagctgaatgctaagcaaatactgatcatggtaagttataccagcctatctggatgtggtcccattggacatattatgcccatcattaattttaaagcctcttctcataacaaaacccttaataattcagtgactggttattaaatctgtggattatcaaagttctctcttcttccttaccagtttttgaatatttcactgcctatcaatatccctaccagtaagtacactgaggaaaaggaaaggaagaaaccctcaaaacaattagatcagccagtgtgctatcagctctggtaaagtacttgagggacatgtaactataataccacaacttctgaaatttactgaataatgtgtggtgtagtgaataaagaaaatctgggagtctatccctgttgattctaatattaactagatatttattactggaaaacaatgtagttaatgctttaaaaatgttaagtctaactatactaggcagtcactataaaagtgaggaaaatgccaaaaaataatttaaaaacaccatttatttaacccaacaaccctgataaccattgtgaacattattctaaatggcccttcattctttttaaaaactacccaaaaaacttgaaaaaattgttataatacatgtttaatattataaccaaatactggttataatttttttccaatgcattatatcatgaacattttcccacaatattaagtattcttcacaaacatgatttttaatcacagtaaagataatccattacctatttaatgttttcctgattttatgtttgaccatctctctacataattctaatcacaactctggttatttagttaggatatacttctagaaaaggaattcctgggttaaaaccagagttccctatttataatcaagttttctaccagatttataccaagatagagtcctactggcagtgagtgagagacctatctcaccatactctcaccaacactggaagggatcaaaaggataaatagaaaatatgtgttttagttagtagtgactaacattctgattcaaccctctcttggggcctaagtttccttatgcatataaagagatagatagggaggcagctggagtatgtgatgcctgagagctaacattcaatggtcccttccatccttgctgctcattctttagttgtataatgtatgtctggaattaactaatttctctcttaatttgggtttccttgggggcagtacaagtcatttgcttaggaggtgatcccaggggaaaaaaaaattaagtagatgtgctctggtttaaggaaaacaaatatttggaaaccaaagttctatacagagttttttaagaacaggaattttagaaagtatatcttaatttgcaaaactcatttcattaataagcttgcctagcatagtacaaacatgatttagttgccaaacatttgacattaatttttcaggaagacacccactgtattaatgatgatatctgagctacattagcatatccagtgctcagatagattagtggcaggtcagaattcagatccaggccaaagaataacacgagggtgtcactgtagtcttacttctagacaaactctgatattttatagcagacactggtaggaaaaaatgttagagatgcaaactaatggttttcacatagtaaaaaagctttcacatacaaagtagtatccccatcttaactatggaaagattgagagaaacccttatatctctgccttccatttctgagaaggaaggaattgttgtgaagtccatctaagtggcaagttctcatttatcacagtgctgttcctgttaatcaatgccctgcagatgcttctattcaaattaatcattcatcttcttcactgtcaaaggttgagcttgttcagatagtcatcgatggagtcaattacctggtggattgtgaaaagaagttggagagaggccaagatattaaggtgccaccccctctgcctcagtttggcaaaaagtaaactttccctttcccaatttataaataatctgtctgctggtacgacagacataaatctctactctgagagtttttatacacttggaaaaatataaaattgtagatcctgcctatctttacaataaaactctccttaatata

SEQ ID NO: 1155 - DNA, 315 bp, Homo sapiens
gtgggtgagagttctgttgtcctgtggtctagccattgtctctgtatactcagtctctcaaaaacaattcaaaatttgatgtctgaaatactgaaaatgtttttagcatagtctgaaagcagaattcttccttcagcatgcagattgttaccttgaatcttgttattttctgtctatcctgtgatgtctatagcctgaaggaacacaatagagtaggtgggagcaattaattgtgtaacaagttaggaaacagctccacacaaaaaagataaatactttttaatagaaatgagatcaagttatgcaccctatagt

SEQ ID NO: 1156 - DNA, 3294 bp, Homo sapiens
ctcctcagcaaatgcaaaagaacggatatcataacagtctctcagaccacagtgcaatcaaattagaactcaagattaagaaactcactcaaaaccgcacgaatacatggaaattgaacaacctgctcctgaatgactactgggtaaataacgaaataaaggcagaaataaataagttctttgaaaccaatgagaacaaagacacaatgtaccagaatctctgggacacagctaaagcagtgtttagagggaaatttatagcagcaaatgcccacaggagaaagcaggaaagatctaaaatcgacaccctaacatcacaattaaaagagctagagaagtgaaagcaaacaaattcaaaagctagcagaagacaagaaataactaagatcagagcagaactgaaggagatagagacacaaagacacaaaaaaaccttcaaaaaatcagtgaatccaggagcgggttttttgaaaagattaacaaaatagaccactagtcaggctaaaaagagagaagaatcaaacagacacaataaaaagtgataaaggggctatcaccactgatcgtacagaaatacaaactaccatcagagaatactataaacacctctgtgcaaatatactagaaaatctagaagaaatggataaattcctggacacatacaccctcccaagactaaaccaggaagaagtcaaatctctgaatagaccaaaaacaagttctgaaattaaggcagtaattaatagcctaccaaccaaaaaaagtctaggaccagacagatgcacagctgaattctaccagaggtacaaagaggagctggtaccagtccttctgaaactattccaaacaatagaaaaagagggactcctccctaactcattgtatgaggccagcatcatcctgataccaaaacctggcagagacacaataaaaaaagaaaaatttcacggcaatatctctgatgaacactgatgtgaaaatcctcaataaaatactggcaaaccgaatccagcagcacatcaaaaagcttatccaccaaaatcaactcagcttcatctctgagatgcaaggctggttcaacgtacacaaatcaataaacgtaaaccatcccatgaacagaaccaatgacaaaaaccacatgattatctcaatagatgcagaaaaggcctttgacaaaattcagcagcccttcatgctaaaagttctcaataaactaggtattgatggaacatatctcaaaattataagagctatttatgacaaacccacagccaacaggcaaaagctggaagcattccctttgaaaactgcacaagacagggatgccctctcccaccactcctattcaacatagtgttggaagttctggccagggcaatcaggcaagagaaagaaagaaagggtattcacgcaggaagagaggaagttaagttgtctgtgtttgcagatgacatgattgtatatttagaaaaccccatcatctcagcccaaaatcttaagttgataagcaacttcatcaaagtctcaggatacaaaatcaatgtgcaaaaatcacaagcattcctatacaccaatagacaaacagagccaaatcatgaatgaactcccattcacaattgcttcaaagagaatacaatacctaggaatacaacttacgagggatgtgaaggacctcttcaaggagaactacaaaccactactcagaaataaaagaggagacaaacaaatggaaaaacgttccatgctcatggataggaagaatcaattatagtgaaaatggccatactgcccaaagtaatttatagattcaatgctatccccatcaagctaccattgacttcacagaattagaaaaaactactttaaatttcatatggaaccaaaaaggagcgcatatagccaagtcaatcctaagcaaaaagaacaaagctggaggcatcatgctacctgacttcaaactatactacaaggctacagtaactaaaacagcatggtacttgtaccaaaacaaatatatagaccaatggaacatacagaggccccagaaataacatcacacatctacaaccatctgatctttgaaaaacctggcaaaaactagaaatggggaaaggattccctgtttaataaatggtgttgggaaaactggctagccatatgcagaaaactgaaactggaccccttccttacactttatacaaaaagtaactcaagatggattaaagacttaaacataagacctaaaaaccataaaaaccctagaagaaaacctaggcaataccattcaggacataggcatgggcaaagacttcatgactaaaacaccaagagcaatggcaacaaaagccagaattgacaaatgggatctaattaaagagcttctgcacagcaaaataaattatcagagtgaacaggcaacctacggaatgggagaaaatttttgcaatctatccatctgacaaagggctaatatccagaatctaaaaggaacttaaacaaatttacaagaaaaaaacaaccccatcaaaaagtgggcaaaggatatgaacagacacttctcaaaagaagacatttatgtggccaaaaaacatgaaataaaagctcatcatcactggtcattagataaatgcaaattaaaaccacaccgagataccatctcacggccagttagaatggtgatcattaaaaagtcaggaaacagttgctggagaagatgtggagaaataggaatgctttcacactgttggtgggagtgtaaattagttcaaccattatggaagacagtgtggcaattcctcaaggatctagaaccagaaataccatttgacccagccatcccattactgggtatatacccaaaggattataaatcattctataaagacaaatgcacacgtgtgtttattgagtcactgttcacaacagcaaagacttggaaccaacccaaatgcccatcaatgatagactggataaagaaaatgtggcacacatacaccatggaatactatgcagccataaaaaaggatgagttcatgtcctttgcagggacatggatgaagctggaaaccatcattctcaggcaaactaacacaagaacagaaaaccaaacactgtatgttctcactcataagtgggagttgaacaatgagaacacatggacacagggagggaaacatcacacactggggccagttggggggtgggggtttggggagggatagcattaggagaaatacctaaggttgatgatggattgatgggtgcagcaaaccaccatggcacatgtatacctat

SEQ ID NO: 1157 - DNA, 2437 bp, Homo sapiens
gagattgtagtaggagagtatcatgggatactctctttaatatttacacagaattatgaagggatacacaagaaggtgaattccccttttaagaaatataactgttaataaaaggaaagcaattttccattttgcacaaatttaggacagaaatattcaaagagggtagtgactacagtttcttcacacttagatgagagaataaacaaatacacaacagtagtgatggtaattatcagaggaagaattattaccatatatatatatatatatatatatatatatacttcattaaaatggatatatcttttctcatatagagaaataaaaacttgattgtgaagataaatgggtctcagcagttgctaagaaaatgactggttactttctgtcccttttgaggagcatgcagagaaattgctttagcctctgataaataaaacagactgcgaggaaaattacagcgaggaaattacagacatcatctcctttgaacagggaaaaggtaacaggtaagggaatgtgaaaattctgtggaaattgaaggaatgagtaattaagtaatgtgcccatgtctacattcaagccatagtagcttcctaaggtacagatatagctcttttaattgtgaactattattgaacacctaggaaggcagctgtaaggaggacattctttgtcagtacattggtacttacatgtctggtctttgacagtcacagggccaacagtggctgaaggcttgctgactcctgcagcattgacagctttgactcggaattcatattccccaccctctactaggtcttcaacagtaaattgcagttcttccacatcacgcttattgcactgcctccaggcttctttctttgtcccagtagggtcccatgcaaggcactcaacaatatagtgggtaacaggggagcccccatcattcttcgggggtttccatgacagatgcactgtgttctttgtgatgaggccaatcttgagtttaataggaggatcaggaggatctgtaaaaataattaaaggaagtattaagcgttgtttataataatatacttcaattttgagaagatattttaaatttagattttaaagcttacatatcggatctctggcagtggtcctctgaatggtttccacaggtgggccaataccaaaacggttttctgctcgcacacggaagaaatattgctgttcagagaggagatcaggcactacaaatgtggtgcttccacagtctggattgactttggtccaggcttttccatcaatagtcctcttctcaataacatagcctttgatcctgtctcctccatcgtcgtctggcatcttccatgaaagtctgcaactaccccttgtgatatcactgactttcagatctttgggtgggcctggtacatctgttggatgtaaatcacaatataagcaacgttccttaaatgcttaaaaataatttgtttttattctgtagcaactttcaaagtctttcttacccatgactttaactctgcaatttgcagtcttttgtcctgctttattcttggctgtgatgctgtatttgcctgtatgagatcgtttacactccggaataataattactgaggagttttcagcagtctccagctgtacaaagaaaatagtagtcatacattgaatgaaatcatagcaatattgaagtcaaccatattctgaattattttaattattatttttttacctgtgcatcttcgggtatgtcatgaactccatcctattagaaaaggagacagtcagttgtagtataaatactccttatagtgattcagtggaaaaaagaggagaatggttattttcctaccttcattgctttctttgcctttccatcaaattcccaagatgattttggtgttgggcgtcccttgatgacagcaggaatcctaatctgtgagccagctttacaaaccagacagtcctgtgctccaatgtcaatgaaaacttctggttcctctgtaataccacatacaatttaacaggatttagctcatatttgtcaaaagtaattgaaatatcttcagtaaattaatcaatttcataataagatcaaaagaggaatacataaactgagtaagtactagtaccttgaatatcagtggcagggatctccccagttgtatcacttggttcagattcaccagcttcattgacagctttcactctgaatctgtacttcctgagctctttcagattaggcaccacacattcacaggtagttataagtttgtctggttcatttactcttttccagtcagtagtaccttcttcttgcatttctacaatgtatcctttgattgggctgccaccatctttggctggaggtttccatcctagtgagatgcttgacttcgttttatctttaacttctgggcaagaaggtggccccggtggaact

SEQ ID NO: 1158 - DNA, 3016 bp, Homo sapiens
ccagccagtagccagtaattggagagccaccattgtccaaaggaggagtccagctcactagcattgatcctttggtgcgtgccaaaacttttggttttcctggaggtccaggaaggcgataaggatcttgaatgactactttatctgatttgcactcatcactgattccatatttattcactgccctgactcggaactcatactgaccattggggataagtttccagatctagaaattagaaaaacagaaatttattgaagagaatatacttatgttggttttcactcatttaaaaattcaacttattttgggagggatgactgtaagaagaaataaatatatagactcaaaacatgggaagacagagaaaaggagaaagctttttttaaaataaaaatatgtagatgtattgtacctgatagtggatctcaattaaaagagtatctgtgtatcaaacgctatgtactaaggagccttatgtgtgtggggctaaacactacaataacaaaataacagcttatcgtgtgtggttttgagtttaattatcaaattccaaggttatattaaaatggcatcaaaccagagtcatgtacttttaatgtgtataagaaaatattcagaagagtttaccccatatcttttctctacagcagtgttggtgacttcctcccattctgctttcttcctacttgcatcacgtttgtcaataacataatgggtgatttcactgccaccattatcaagaggggcatcccatgtcaagtagcaagattcagctttaatgtcagtaacagcaagatttcttggtggggatgggcggtctggaaaggaatcaacagagaatattgagaaggcaattcttaaacagacactggatgcctttttgatgtaagaaagcaagtcacttaccatatacttcaacgtgaacatttcggaacactgagccaaggcgattggaagcagtaactgtgtaagtgcctttgtcctcccggaccgctttgggaatgctaagctcagtttttgcctcacttcgggatacctcttccttggttatctgaagtgcatcagtgggtttttcaattacagtttcatttttggaccattcaatcttaggcattggaaggcctgtcacatctgcagggatgtggacaggctctcctgccttaactttgatagtgtctcctcgaacactcagacgcaacttaatagttggaggcactgcaaagagaagagaaagaaaaacagtaacaaagtcataaggatgtttttttcaacttatgggataaaggcacactgtaaaatgcattaaaattattattatattcagattccgcaccttcatcatcttgtatgactacattaagaggtagggatggttcactttcaccaatttcattgacagctttgacacggaactcatacatttggtgttcatcaagattttcaaccagaaaagatgtggttgggcagagtcgcttgttaactctttcaaagtcaggtttgtcatgacgccgtttttcaatgatatatccttggatgggactgccaccattactgcggggctctttccagtcaagtgtgatagtggactttgtcctttcagtgtatgtgagcctctctggagatgttggaggacctttagccagaggcaagtgaaaatgattagcatgagataaatattcatgtaagaaataatatttcacttcaacttaattatgtaaaaaatagccttctgtttggcataaccttacatccttatttaaaatcattcctaaaacttgtcagttgccaaaattatagacattcatgtagacagaatttttcttagcaaacttttcatcaagattatcagtgaaaaataaatcaagggcacgtatgcttttttaatttaacattttagattgtttacctttgtaactggggatgcttctaattctactgaactaggaaagtaagtctgtgaagctttgctttgaatgaccagctgagagcaaagtgttttttcttttattaacagatagtggatatgtctatgaacatactttgagtcatgttgcctcacatgtgggttcaaaatatggtggaaagaggatgtatgtaatgctgctgaagttttctttcctgaaggaccaaactaagagttaagctttcagtggtaaaactagacccaatccatacttgttgactgttattgcaaccagaaggagtggaagctcagctctgttctggtgcctctggcacagcctgtggtatattggacgttcatagatgagctgcagcagtgatataggatgtatttttttttttcagggggtgatggtgaaggaataagttcttctgtctcttgaggaatgggtcttcctcaaagcctttgctttcttagatgggatgtcagtgtgcattactgtgtgtgcaattttagtgtttcgtattgatttctgggagattccctctggttggttttctattctttggaggctgtttctggttttgggcctctctatccttccagtatggggactttttgaatatagaggaagactaaggcatttattctcaggaattgtctaatcttttagaagaacattgaattctctttaactactacgctagtaagttttaaaaacccgacttccaatgtgttctactggagagatataatatgtctaaactacttctaggttattattaagcccctgtagatccaagtttttcagtacaagaaaccatgcatgattaatatacttacagccacaaattacattgaaattataggaaatatgatatctttaatgttgctaatagttttttgatttacttttcttattactctttagctatagattttgagactgttgggagtttgaagccataaagctcagtaaataatataactagaagcaaaacattactctataaacacaatgaaaccttctcttttacctagtggatcaactgcaagaattggtcctatttcaacaggagggccacagccaaacttgttcttggcaataa

SEQ ID NO: 1159 - DNA, 7189 bp, Homo sapiens
ccaagttacttttgggaatggcactcctttgatgatggcactaagtcttagagtatcaccaactttaatgtgttgttctcttgccatgttggcatcaagaatcaactcagggggttctagaataaagagaacagaacactcagatttgatccataatgcagattacaattaaacacatacaatcagacatctattttccttgcaaacacaagtgagagcattttactcaccaagcctgtcttttactaggactggctccggaacatgagctggatctgattcaccagctgcattgactgctaacactctaaacttataggtttgaccgtcccgaagaccggtgactttatatttagtttcaggacatgactcaggggtgtgattggctcttctccactcttcatctccaactttctggtactcaacaatataacccagaatcttgctcccaccatcatgacgtggtggctgccaagttagatcgactgaattgcatgttgtatctattgcttcaggattaacaggtggacttggtttagctaaaaaataaaagtaaaaaacgaattagcatatagctgaaaacaaagttagataacatgaaaactgaataaatccattaatactataccaattggatctttagcaaagactggtttggatggtgggcttggatctccaataccaatttcattttctgcagaaacccggaattcatactgacatccttctagaagatcaggaaccctaaatttagtgtatggatgaataggatctttggtaactctagcccatcgtttagacatagtttctctcttttccaggatgtagtttgtgatgggttttcctccatcatgtggcttattccaggttactaatgcagagtctttggtaacttctgtaacaattggctgatcaggtgcatcaggaacccctgtaacaaatgttggaaaatgcgttagaaatttatttctttatattagttttatcaagcattgaatcactaaaaagaaacataatgcatactgaaacgatctttggctttcattgaatcagacaccagaggatcacttattccatacagattttcagcatgtatccggaaaatataatcttttccttcaagtagtttagaaactttgcatgttgttttagcacttgcagatgtcactggcatccagacgtctttacccacttccttcttctcaataatataattggtgattttactgcctccatcatctaaaggaggcttccaagagataaccatgtaatctttggtcacctcatcaaaactaactggtcctactggtggtccaggacggtctgcagaaaaaaaaaatcatggcacaaaatgttattgccatttctgcttttgaaagaacagaagatctattctttccactaaataagacttaccaacaacattaacttgacagaaacctttcctagagcctgtactgttctccacaaccacacagtatttgccggaatctgaacgtttggccttgatcttctctaaagcaagtgttgctggtgtagtctttatatgagtgcgatcatcttccagcacatcagcttcatctttgaaccaggaaaccttaggctttggtttgcctgagtaacggccagtgagggcaaaagcttcaccaactcgaatcgtgagcttatctctgaagtcgaggtgaagcgttgggggtgctaaaatttgtaattataaaggcaagtcatttttattgatgtcttattacaaatctacaaatgtgcaagtttcagaagtataaattgtagtagacacatacccagctcatccttgcaagtaattggtttggtgcaaaatgatggtttgccttgtccaacaatgttgacagcactgacacggtactcataggtatcaccttcttttaagcctttaacagtgtattttctgctaagcaagttgtcatttgtaactttgtggaacttctcagtcccaatgagccgactttctaggacatagttaataatttctgacccaccatcatacttaggaggattccaagtcaaagttacagtatttttagtaacttctttgacttccaggtcttcaggacgctctggtacagctgcgaatataagtataggaattgtggtagaaaaaaatgtcacattaagaatgtagtaggatgtagtgaatattccttttctgaagattgcatttaaacattaaactctctgctcccataaatagcaaaagagatctcatcataaaactattagagttaaaaaggacccaatacaattgaatttcttcacttgacagatgaggaaatagaggtttgttgaggcaaaataatttaggaaaggtcttcagaattggtagttttagaagtaggaaaataattcagtttctattaatgccattaagtgggaaattaaaaaaaaatctgtgaggtatagatggaagaaatttgataaatgaactaggagtggtaatgccagcactttcggaggccgaggcaggtggatcacttgaggccaggagtttgagaccagcctggccaacatggcaaaaccctgcctctactagaaatagaaaaattagctgggcatggtggtgcatgtctgtaatcccagctactcgggagactgagacacaagaatcacttgaacctcagaggtggaggttgcagtgagccaagatcatgacactatactccagcctcggtaacagtaagactatgtgtcaaaacaaaacccaaaagaaaaaaaaaaacaaaaagaaattcaatgaattatacatatttgtaaaatctctttcacaatcactgtccaaatactaccaaatcagatactgagtagttgtgtgataactgcttgtcaagtgaatgaaatgtacggcatttatacacatattttttcaccatagtcttgtactaaatgagtaaagaagtgattaagtatacatttttttttttttacttacttattggctctctgataacaagtgcctctgatgtctcaacaaatggacccatgccaatactattttcagccgcaattcggaaaaagtaggcttttccttgaatgagaccctggacagtagcattttgtcgggtaactgtatatgtcactggggtccatgctctgcggtcagattcacgcttttcaatgacataattggtgattggagagcctccatcatcttctggagaaaaccatgtcagtttgcaggactcattggttaggttgtgagctaggaatggtgttccaacgggacctggaacatctggaaataagaagaaaataattcaagctgtttgccttcaatgaaagataatgctcaacacttgtttttttaaaaggagacaaaaatgttgttttgaagaaagtaaggttttgtgtctactaattgagttagtttttccttctgctatctagtcaatacaaaaacagtcaaccactttttttttttttttttttttttgagatgggagtctcgctctgtcacccaggctggagttcagtggcacaatctcagctcactgcaacctccgcttcccaggttcaagcaattctcctgcctcagcctcccaagtagctgggactacaggcatgtgccaccataccaggctaatttttgcatttttagtagagacagggtttcaccatgttggtcaggctggtctcgaactcctgacctcaagtgatccacctgccttggcctcccaaagtcaggggattacaggtgtgagccatagcatcaagccccatatttgttaatgaagtaggtttgcaacagttattggttaccatggttttagtagaggctgaagggaaaataaaaatgctttttaaaagcaatttgtgagttggacaggagggagctgggaggcaagcatgcagagggatacaagagatgggtaagagtggcatagtcagtttctatgtccagtttcctctgcaggggaaacggagagagagatggtttatttctggatgaccagtggatcaacaagcagcataggaggccccaaatttcagaatgactttgaggaggttgcaaataattaacgtggaaatgtaccagttctcaaattaaagtaataaccattaggcaaaagagctttaggtgcttgaaactaacctgaaagtttgtggggctactgcttaatgaaatatttttccttatgccattcttatattaattatattcaacatagaactggcaattttcacataaaaactgtggctggagtattgttgtgcctagagacatgcttagaaagagccctgagtggaaaggcttcgtgttctgagcaaatcactggactaaagcctccagtgagagccatgaaaaagcctcatagagttcaactctatattcagtgactagaaatgcaatattgataaccaactatgatgcttctcttcaattagaatactgaaacccttcaaacaggtttttgcattattatgataatttagcgataggggtagagtctcatgatgtgaaatggtcagcactggcaaattgttaaacattcatgtacagtttaaggaaagttgcagattgttaaacattcatgtacagtttaaggaaagttgcttctatgaaaactatataacaacataatagacactatgggggcaagttctataaaaaagccatatttattctgggccatgattcagaatacatattcatggccttctagcaatttgagaattgtgtacatgcactctttaggttcactggaaacatggatgcatgtcttcttgttagcatctgttttctcaattatataatttgtaaacttacacccaccatacagaatacacatagaataaaaaagtaaggaggaaatttttaaaaattctaataatgttcaacatgattatgggtgatttttcttattttccaaaatgtttgttacacagcatacagcatagctttgtgtaaatataataagaatgttggtttaaaaagttgcacagacaaattgaaagtatttacctaatacatcaacaataattgtcttctttctttctccgcttcatttttggcaagaagagaatagacgccttgatggctcctctggcagttcttgatgaccatggatgagctaatggctgtggtctcaatggtggcttcttgaggtaaggttctttcattcatgttccaggtgacggttggaggaggctttccagacacataggcaatgattcggatcacccctccagcatggacaacaattctatctctgacactggcatctagctgaaggtcaggtgaaactggaagcaattgaaaattacaaatgtgatttttccccttcaatctgaaacataaatactgatggcataaggaaggattgataattaccaagtctgtccttcatttcaatgacatctgtgacctctccaggttctccaatgccagcaatgttgactgctctaactctaaatttgtagaatgctccttcctttaatcctgtcacaacaagctttgttcctctcacttctttatctttaccctggggagaaatcatagacattttataattagaatagttctttgtagcttcttgctttaatggcttcctaaagcatcaccagcagcctatttaactgtttactctgggaaaattgttgctggtttaggttttagggatcagatattacaggcaacactgaatggaataacttggcaggagttatgctttaaaattattgtcaaatgattaaaccttgatttatttattccacattccagggtttataaccaaaagattagtaataacatgacttaacttttgattcgatttctgacattaacagatgtttggaatgtgagttaaaattatgctattttcctgatttcttaatccaaaaagtatagacagaagttaatgggattgagaataactatgacattttttagtttattcatagtgcatttccttagtgccaagttttcctaccttttcccattcttcttttccttcttctttatattcaacgatgtatccagttactttggatccaccatcttttagtgggggagaccactccagatctgcagatgatttagtccaatctgtcactttgggaaatggaggaccaggaggggctgcaaagagccagtatacgttagtattcttgacttttccaaggcacttttggaaaataagatttaaaaaaaaggaatggtttccaggcttaccaattggatctctagcagtcgctgggtctgatggcagacttgctggacccacgccagcagcattgattgcatatacccggaattgatagtcggaaccttcaataagaccagtcactttataagaaacacccaaagtcatggctttgataggatctcggttaactctcttccatctctttgaagtggtgtctttcatttccagccagtaccctgtcacaggagagcctccatcatattctggctcttcccagttgacagtcatggagttacgagtcacgctgctaactgttggtttatctggtgctccagggacagctgtgaaaaagatcatattgattataagaaatttaaaaaaaaagtaaaaatggctttgtatgtgaaaatgttctcctacttacagaagaggtttcttgctgtttcaggttcactgtcaagaggttctccaatgccatatttattctgggccatgattcggaatacatattcatggccttctagcaatttgggaatcgtgtacgtgcactccttaggttcactggagacatggacccatgtcttcctgttagcttctcttttctcaattacatagtttgtaatcttagacccaccatcatctttaggtggaaaccaagatagtgtcatttgatctgctgaaacagattcaaattttatgggtcccactggagggccaggacgacctaaaatggtttaaagaaggaaccctttatcactcagatgattttaaagccaaatgttatttatgaacagaaaaacaagtaattttaaccaaaccatgcagtctttacccaggacattcagtctcatctcctttgatgctgttcccagattatttacagctgtgatggtatataagccagtgtcactcctgcgagactgcggaataactaaagtgcaagtatcatctaccaccagtttgttgacatgggtgtcatagagaacaggttctttgttatcaggcttctttgg

SEQ ID NO: 1160 - DNA, 715 bp, Homo sapiens
gggagtttgaaaacagcctgaccaacatggagaaacctcgtctctactaaaaacacaaaattatccgggcatggtggcacatgcttgtaatcccagctactcagaaaggctgaggcaggagaatcacttgaacccaggaggcagaggttgtggtgagccgagatggagccattgcattccagcctgagcaacaagagtgaaaaaaaaaagaaaaaagctcaattatgtgtctcaaaaaaaaaaaaaaagaaagaaaagagctaaattatgtggtgctttggaagctgggaccacatggactcttaagagggatggcaccttctaagaggttccaagggcggaaacaaggggcagttccactgggtttcagacacagagatcccagcctggattgtcgtggaggatgaagctgctccatcttggatgctgatccgccatgttgtcctctggttaacccctgttctggaatgcctcctctaagattgccactttatctactgtgaccttaaatcctgctcttaggtagattcacatagcattctgcgcctttccctgaggggttgacttcagtggtgccacacatttctactgaggcatgtgtaccttttgcatcaggtatatcagccctgggactcggggataactgactgacggctgcctggcttctgtttctaagttgctattaaatgtttctttctgagaaactggatacatc

SEQ ID NO: 1161 - DNA, 1193 bp, Homo sapiens
gcccattttatcctgggtgtgagagggaaaagaaatttacatccctttgctttagagtccgtggcttatatgccacggtgccttcagttcactttatatattcatgggtataatttagtagggacgagggagggtgcaggagggaggcaaattgtcctttcttcagtgaatacaggggaacagatggttgttatttgctgagtgattctggaaaatcactaccttgaattctcagttttgagtctgacatttgttctgtcaccatttccccagtaaacaggaataaaaaacgagccacatttgacaaggaaaacactgcttggccgagagacaaacattgtcaggatgttggccacgctcccgcgcctttgtgtggtggcgtacgtgtcacagtggcgtctgccaggaggtggcaggcgacacctccaaaaccaccccagtgctgaagggcggggctgcgattttttcctggatttaaatcgttgaaaagggaggaaaagaggatggagtgaagtctccctccaccagagagcattttgcaagctgtctgtgctccggggtgttaaagccggagacccatccagattgtcccagaccacctcagaagaaagaacccggagtacaggaagacatgggaacaaaaacggaggcgaaagaggacgaacgggaaatagcaggaaagaccgtcacaacttttccctgtgactgcagcctctgagaaaagcaactctgggcaaagcataggtgtccagatgtgcctggagctcacgctgggtgcccaccggctggcccttcggttcctgcttcggggcagagagcgttgaaatcactctcccctcgccccagccgctggctcctggctgggagcctggtcattaaggtccagaggagaaacagacctctggggacctgccgttcacctgggaccttccgctgcttgccccggggttgacagcaaccccagatgtccgcaccagccacgctgggccacacttagccccacttttgccattctaccacgcacagccctcacacacactccccatccaaggttccagggctctgggctgaaaatcaccagctgtactgcagggcctggggctgccctcttgaccaagctacctctccctcaggagcagagctgacaggctcacctgtttttaagaaaacatgttgccaccttaaaaattcca

SEQ ID NO: 1162 - DNA, 1193 bp, Homo sapiens
gcccattttatcctgggtgtgagagggaaaagaaatttacatccctttgctttagagtccgtggcttatatgccacggtgccttcagttcactttatatattcatgggtataatttagtagggacgagggagggtgcaggagggaggcaaattgtcctttcttcagtgaatacaggggaacagatggttgttatttgctgagtgattctggaaaatcactaccttgaattctcagttttgagtctgacatttgttctgtcaccatttccccagtaaacaggaataaaaaacgagccacatttgacaaggaaaacactgcttggccgagagacaaacattgtcaggatgttggccacgctcccgcgcctttgtgtggtggcgtagctgtcacagtggcgtctgccaggaggtggcaggcgacacctccaaaaccaccccagtgctgaagggcggggctgcgattttttcctggatttaaatcgttgaaaagggaggaaaagaggatggagtgaagtctccctccaccagagagcattttgcaagctgtctgtgctccggggtgttaaagccggagacccatccagattgtcccagaccacctcagaagaaagaacccggagtacaggaagacatgggaacaaaaacggaggcgaaagaggacgaacgggaaatagcaggaaagaccgtcacaacttttccctgtgactgcagcctctgagaaaagcaactctgggcaaagcataggtgtccagatgtgcctggagctcacgctgggtgcccaccggctggcccttcggttcctgcttcggggcagagagcgttgaaatcactctcccctcgccccaaccgctggatcctggctgggagcctggtcattaaggtccagaggagaaacagacctctggggacctgccgttcacctgggaccttccgctgcttgccccggggttgacagcaaccccagatgtccgcaccagccacgctgggccacacttagccccacttttgccattctaccacgcacagccctcacacacactccccatccaaggttccagggctctgggctgaaaatcaccagctgtactgcagggcctggggctgccctcttgaccaagctacctctccctcaggagcagagctgacaggctcacctgtttttaagaaaacatgttgccaccttaaaaattcca

SEQ ID NO: 1163 - DNA, 761 bp, Homo sapiens
tagatggggttttgccacgttgcctaggctagtcttgaactcccggcctcaagctatcctcctgcttcagcctcgaaagtgctgggatgccaggcgtgagcccctgcgcccgccatgtttcctgttttcatcagtgcagggagtgcacacatgtaataagctaggagccaagttagtggatgagctggtttattgctcaggatgactgaagtctcaactacggaaccatgttacattcgagcagctgagacagcagctgaagccaggtcctcccgaagcttcaggaagcctgcttgatgctccacggctgagagtgacagagaatccagaatagcttatggatgggtcagttctcgtctcaccacactcccaatatccagcttcctggactgttgtgtagggaagagccacttttttcagttgaagtctgagttcttatgggccatgaccaaggctgctgcttcctcaaaaggcacgaagggggccgcgtgcggtggctcacgcctgtaatcccagcactttgggaggccaaggcgggcggatcacgaggtcaggagtttgagatcagcctggcaaacatggcgacaccctgtctctactaaaaatacaaacattagcccggcgtggtggcgtgtgcctgtagtcccagctacttgggaggctgagacaggagacttgcttgaatgtgggaggcggaggttgcagtgagtcagatcgtgccactgcactccagcctgggtgacaaaagtgaaactcttgtc

SEQ ID NO: 1164 - DNA, 122 bp, Homo sapiens
cggctaattttttgtatttttagtagagacggggtttcaccatgttagccaggatggtcttgatctcctgacctcgtgatccacccgcctcggcctcccaaagtgctgggattacaggcgtg

SEQ ID NO: 1165 - DNA, 137 bp, Homo sapiens
cggctaattttttgtatttttagtagagacggggtttcaccatgttagccaggatggtcttgatctcctgacctcgtgatccacccgcctcggcctcccaaagtgctgggattacaggcgtgagccacagtgcccgg

SEQ ID NO: 1166 - DNA, 761 bp, Homo sapiens
tagatggggttttgccacgttgcctaggctagtcttgaactcccggcctcaagctatcctcctgcttcagcctcgaaagtgctgggatgccaggcgtgagcccctgcgcccgccatgtttcctgttttcatcagtgcagggagtgcacacatgtaataagctaggagccaagttagtggatgagctggtttattgctcaggatgactgaagtctcaactacggaaccatgttacattcgagcagctgagacagcagctgaagccaggtcctcccgaagcttcaggaagcctgcttgatgctccacggctgagagtgacagagaatccagaatagcttatggatgggtcagttctcgtctcaccacactcccaatatccagcttcctggactgttgtgtagggaagagccacttttttcagttgaagtctgagttcttatgggccatgaccaaggctgctgcttcctcaaaaggcacgaagggggccgcgtgcggtggctcacgcctgtaatcccagcactttgggaggccaaggcgggcggatcacgaggtcaggagtttgagatcagcctggcaaacatggcgacaccctgtctctactaaaaatacaaacattagcccggcgtggtggcgtgcgcctgtagtcccagctacttgggaggctgagacaggagacttgcttgaatgtgggaggcggaggttgcagtgagtcagatcgtgccactgcactccagcctgggtgacaaaagtgaaactcttgtc

SEQ ID NO: 1167 - DNA, 5530 bp, Homo sapiens
ttttttttttttagacagagtctcggtctgtcgcccaggctggagtgcagtggcacgatcttggctcgctgcaacctctgcctcccaggttcaagtgattcttctttttcttaaaaaacataaagctctaaaatgtaagcaccctggctgactcttcctaccatgcacagaaaggaaaaatttggtgtccagggccttctgaatcagacctggaaaagctcttaattagcttatggattcaggaaactgcggatagagtcactgaagaggttgagacagtagaggtgggttgaagcacttttaatcacaaacaaacaatagtataagaccgtgaacagctcacccagtggctgttgccctcctccagccctcagctcaccctcttcccatgctccctccctgggtaccattgagtaaagagcagggtattggcagctgtccctgttgctatcaggtgattgataggaaggggatctagctagggaccacggcaatcctggccatccatccatggttctgtttctatacaacttcatcatgtgacatattccagctgtgaaagaggaacagtacagaaatgtgggactgaacttggctgctccattcagatggtccaggggtttagagtgtcaagagccaagggcaaaaaagaaggagaagtctggagttggcataattcaagatgcagccaaatgtggaactaaggtgggttcagtggggaccagggaaggcctcatggccccagtccacaattgtgccccaaccccggcaatgaaactcacgcatatgcacaaacgcacatcaacaaacacacaaaaacacacagagcaaataacattactgaaagaacctggaggctattaaatacaaaatggcagttttctttcaaagtgaaaatatttgcttctttgatactcctcagtgccttgcagtctcccaatcacagaagagtagatatgggaagggccaagaggagtatgttgccagtggccctacaagtccatgtgtgctgaagtccctatagcaaccaccttactcttcagcccagtagctgcctcccatgtgaccattcacccgattggcaccattgctggagctactgtcacagggactttttgtgcaggtggtcacatcttcttcctctgagctgctctccacatcactgcgatcatccttcgatacctgggtgggatgagaccaaagacagaaaagtgaggaaagaactgtaagacacctaagctcagagacccaggtgtgggcactgtgttcccagtctggtctgctttctgatgacatctaactcaaagaagtattgtctggactatggctactgttgtgactatgctttacctgctttctagttttctcccttgtcatctccaattctgttctctgtggaattgaagctactttggtagaggagtgtgtctttcaggaccagcctaagagaactgacatcattcactgagacctggtttaggtttcagacaccctttctcttcttccacttcaaagaacagggaaggccaacacgaacaatacgtatgactgtcagcaatgcttctatcttctggtggttgtggacaatgcatttattcgtattggttatgctgttttgctttatccccaaagctgatccataacaggccttttttagtagtttcccactcctgggctcaactaccactatcctatgacactgttttccaatcttcttccctttcccaatagcaagatcacttttcttatgaaacttcagcatccctggctgggcgtggtggctcacgcctgtaatcccagcactttgggaggccgaggcaggcggatcacaaggtcaggagtttgagaccagcctgagcaacatggagaaaccctgtctctactaaaaatacaaaaattagccgggtgtggtggcgcgcacctgtaatcccagctactcaggaggctgaggcaggagaatctcttgaaccccggaggtggaggttgcagtgagctgagatcgtgccactgcactccagcgtgggcgacagagtgagactccatctcaaaaaaaaaaaaaaaaaaagaaaaaaaaaaagaaacttcagcatccccaagatacacagtatagtgaaaacacaaatggattggcagtcaatgagaaaagaatcccagttctaatcatgctaccatctgtgaatgcttattaacctgggtttttttgttttgtattattttcaaatgaagcatttggattacagcagcatttcctaatctaaactatcctgcatatcaagcaaagtatttcaatttctccaccatgagccaggcacagtggcttacacctataatcctagcactttgggaggctgagggaggaggacagcttgagcccaagagtttgagaccagcctgggcaacatggagagagccctgtctctacaaaaaataaaaaatgacaaaatcagttgggcatggtgacatgcacctgtagtcctagctacttgggaggctgaggcaggagcatctcttgagcccaggaggtcgaggctgcagtgagccatgattgcgccactgtactccagcctgggcaatggagcaaaaccttgtctctaaaaaaaaaaagggccgagcatggtggcttacgcctgtaatcccagcactttgggaggctgaagtgggcgcatcacctgaggtcgggagttcgagaccagccagaccaacatgaagaaaccccgtctctactaaaaatacaaaaaaattagccaggcgtggtggcgtatgcctgtaatcccagctactcaggaggctgaggcaggagactcgcttgaactgggcaggcagaggttgcagtgagccaagatcacgccattgcactccagcctgggcaacaagagctaaactctgtctcaaaaataaataaataaaaattaaaaaaaaaaaattaccctggactctaatagtaaagaacagaaatccagtgagacctgtgtcggacttctgacctccagaactgaaggataataaatgtggtttaagtaaaggagagaaggaagtgaaaaggaacacagctgtaacaactgttgccaaggaggtgggcatttgctttggatcagctccttgaatttgtgttggatgggtcttctacagttgattatagctgttggcctctgaacttagatgactaactgattacctgacctttaggaaatttccactagagggcagagtgtctctagatttgaggtaaacagagactcaagaaaaacaaaaaaaagtagactcaattcttgcctcagtttaggaaaaaatctggcaactgcagctctagtcaataatggccccgaaaagtcaggagagagggcatgctctgagacaaacacaagggaacagaaaggagagcaggaggaaagagaaccacattcagatggacatgcctcactgaatactagaagcacagatacacttacatgcaagagatgaaactgtccagctcccgccaggcatagaaaaaaggaaggaggtgaggaaagagtggagagtacagggtctaatccttcctggacaggtcacctagtcaggaaagaaaagcaggagagaacagagatgtccagtagctacagcaagatgcacaggcacactgagcaagttctgagccaatggcagctataaggaataatgatgcaggagatcatcaatatctaggccacattccatcacttggtcctagtatcagtacctgctcaagcagagcccctcccacttgggattctgtattcctttaggctgaaatccctagccctttgactacagtctgactgcttcaaaacttgcaaagttcaattatgagtttatcattaagtggcacctttctttcgctcttggcataagatgggtatttgaaacactacatacccattcacttaggacacttgcctcatacactagtggggtgaggtgggtatttagttccttatataaaccatatcttgaatatcacagcatggtcaccttgtggtggcttgtgaactaccacacaccacttctaggcaacttaacaatctgcttttatacagtttatatggttctgcatatgatttcctttgaaaagggccccatgtcaaaaagaaaaatatgaaatccactgaagcaggtaggtaaggggtaggaaatggttgaggccatctcttaaaaaactcttaaccctatcatcctttaacaaaagccattcctaagggacaggaagaaggtagaactttcctcttgcgtctaagtcacatcttaaaaggtaaaacaggcaggccaggtgcggtggctcacgcctgtaatcccagcacttcgggaggccaaggtgggcagatcacaaggtcgggagttagagaccagcctggccaacatagtgaaaccccgtttctactaagaatacaaaaattagccaggcctggtggcatgcgcctgtaatcccagctactagggaggctgaggcaggagaatcgcttgaacccaggaggtggaggttgtggtgagccaagatcgtgacattgcactccagcctgggcaacagagcgagattccatctgaaaaaaaaaaaaaaaaaaggtaaaacaggcttggtgtggtggctcacacctgtaattccatcgctttgggaagccgtggtgggaggactgcttgaggccagtagttggacattggcctgggtaacatagtgacaccctatctacaaaaaataagaaaattagccaggcgtggtggtgcacacctatagtcccagctacttgggaggctgcagtgggagaatccaagcccaggtgtgaggctgcagtaagctatgatcatgccactgaactccagcctgggtgacagagcaagaccttgtctctaaaataaaaaaggcaaaacacttaccgaagaggcgaagactttggagccctaggctttttgcttggcctgcttgagtagatggggctcaccaggtttgatggagagagaacgtctgttgagtaatccctatcttccatacccaaaagaaagaagccatctttcatcctcacctttcccctgatcaaggctttcaaagcaatccgtgcaattaggtaggaccagatgacatgcagaagctgtagggtcagcagcaggccattgaggagccaccatgaagcataaggcccgattatctcccaactctcaaagagggtcgtgttcagaatcctagaagagggaggccaatagtcagattctagagtcaaagctcagcagacagggatgaagctgagtcctggggatgcagagccctgtgtgttttcctaccagcccttttatcagctgaagttccagggaccgtcatccacagtaagaaaataaagaaagggaggagcctgttgtgttttctatccttagggacagagaaagatatataaatcttaggaactgatggattaagtcacattattaatcacttcaaatatccagagtttcacgaaattaggacagcagtgggactctaatcctatgaatgactgagctcctcaggcacatataggataggaca

SEQ ID NO: 1168 - DNA, 188 bp, Homo sapiens
accttttagttattgttgtatgtgaaatcacttttgccaggcgtggtggctcacacctataatcccaaaatgttgggaggtcagcatgggtggatcacttgaggttaggagttcaagaccagcctgaccaacatggggaaaccccatctctactaaaaacataaaaattagccaggtatggtggcacg

SEQ ID NO: 1169 - DNA, 1242 bp, Homo sapiens
caactattgcatttcatgttgcctattcatattaagagaatagcattacttttattatgatgatgatttgtaaacaatttcccagagttaattcccagacatttaaaaattttggccataattgaaagtcaggattttatcttctcagttggaaagtagaagagaaaagtataacagtgaaaaaaatttttcttaggtgtgtatttgtgttggattgttctaatttcaaaacagagaaagttttgaactcctgctttcatggttcattcttagaaataaatagaattgttttcccaagaaaaccttggaaaactttctagtaatagcaggaggaatatgggagtaggaaatggcaagttgaaggattttaatttggaaactgccaccttttggaatacagaagagctggttatgggattggcccctggctttacttgtccttaacatgggctttgataaggggaaaacaaagtgagggcttcgagccacaagtcaaggtcttgggaaagcttagcaaaatggtgcaagtctctcgtgatatctacctttatgcttactgctttctattggcaaaaatctctcatcttttgcagatgcactgagatcccatcagtagacagagaaagaacgtgggtgagtcagaagcaatcagccagaagcacacaaatgggtgtggacatgtcactgccaacaacccacacagagtggctggctactgcattcacccttaggatctcctaatgagcacagttaacagtagttggagctttgtctctgacatcctcttgcagtcatctgccttatttgctgattgatttctgttcttgaaactctgaacaggaagccttctgttgactcatccctgcttttcagactggaaagcacttgtaattttatctgccatgtatagtctctaaaaatttattttgaagatatgctgtatcaaaagcaatttaagaaagtaggaaggtaggaaatataacaaccaaaaccaaacagtgacactaaatatatacatatatatagctgtacactagacttaacctaaactgaccagctagatgattttgatgcagtaaagacaagttaagaaaatttgtctttactgtcaacaagacagtaaacttgtctctatgtcaacaagaaaaaaggcaattagaaattcttggaaaaacagaaatttgcaaatgaagtcccaatttaatatgaggtaaactgaaatgtgacagaattctgcataat

SEQ ID NO: 1170 - DNA, 835 bp, Homo sapiens
tcatccaaaaacagaaccagtaggcatgtgcatgtgcatgtgtgtgtgtgtaaagtgggggagttaaaaagaattggctcacataactatggagtctgagaagtctcaagatccgtagttggcaagctggagacacaggagagtagatggtgtagttccagtctgagggcaagaaatgactgcttgacctagctcaagtagtaccagtcaggccagaggagccccctcctttttgtcctattccggtcttcaactgattgattggacaaggcccacccacattagagaaggcaatctgccttcttcagtttaccaattcaaactttaatctcatccagaaataccctcagggacactcccagaatagtgtttggccaaaagtctgcaccccatggcccagtgaagttaacacataaaagtaaccatcacataaccctagactactgctctcccacaccatccacatctacgtgacacaaaatccagttggtttcaccttctaatatttctcttgtctgtcatgtctgcacgatcaataactctgtccagtttaccctcccccataattcttacatccttcctagtactgcctccgaaggacagccttcctgcctccattcttgtccacttcaaatccatgctacacagggtaagtagggagtagactatctaaaagacagacttcgctgggtgtggtggcacacacctgtaatctcagctactcaggaggctgaagcatgataattgcttgaacctgacaagcagaggttgcagtgagccaaggtggtgccactgcactccagcctgggcaacacagtgagactctgtctcaaaa

SEQ ID NO: 1171 - DNA, 126 bp, Homo sapiens
tctcagctcactgccacctccacctcccaggttcaagtgattctcctgcttcagcctcccgagtagctgggattacaggtgcccgccaccatgcccagctaatttttgtatttttagtagagatgg

SEQ ID NO: 1172 - DNA, 1568 bp, Homo sapiens
gcaaagagtacagagactacatttattgagcacctactaaagggcaggcctggtgcaaggcttttttacatctgtaatcacatataatccttagcacaaaactgagatatgttactatcttcctaatttcacattcaaaaaactgagatcagaggttaagtatatcttatcacataagcttggaaatggcagggcaggaatttgaacttaggtgcttctgactcaaatccatactcttacagtagactatctctctgttgcacatggtgaggatctttatgttcattgtggagggaaaagggagcccaagtctagagattgagtataaagtttgggccaaaagcaggagtagagtctgctggaagactcgctagcagccttagcattggcaccacctccttactaaaaccacatcttgcttcctggcagagcctagtactgttatagttggcagagcattacagggagcttggaagaacttccccggtaccttccaattttccctatttggtcagttcagacttgcgttagtgcaataacctcctaaccaatctcttggcccctatgcttgctttacctccagtctgttcttcgcgttgcacttagaacaacctttccgaagaacagaccagatcttgtcattcctgtgctttagctctttcaagggtttcctgttataattaggataaagtagaaattctttagcatggttggtttgctccttctatccctagccttacttctctccactgtgaacaccatgtttcagcccagcaggaccactattcctccaaatgtaccatgtgctctctcccctctgccgtgggcatattctgctgttcctttaacattgatccattcttcctccttttccttcttactcctacttgtcttctgtgatcactgcttaaaagtcatttttttcagaaagcttttctgaacctcttctccaacactacccccacacatgtagactagcacgctctaatatggccatcatcttattgtattataattaccttgtcttattgatataatttacataacataaaagtcactcttttaaattgtacaattcagtggtttttaatatatttacaaggttatgcaatcactatataatttgagaacattttcatcactcctaaaagaacccacatacacacccattgacagccactccgtgtttccccttcccccaatcccctgacaattattaatctactttttatctctatttatttccctagtctggacattttatgtgaatagaatcataccatatttgtccctttgtgtctgtcttcttgcactaaatatgtttctaaggttcatccatgttgtattatgtatcagtacttcatttcattttatggttgaaatattccattgtatgtatgtaccacattttgtatatccattcgtcagctgatggacatttggattgtttccactttttgagtattaataaataatgcttctattaacatttgtgtacaagtttttgtatggccatgttttcaatggtcttgagtatgtacctagcagtgacactgctacattgtatg

SEQ ID NO: 1173 - DNA, 228 bp, Homo sapiens
gcaccaatcagtgatctgtgtctagctaatctagtgggaacttggagaacttttacatctagctagaggattgtaaatacaccaatcagcactctgtctggctcagggattgtaaacgcaccaatcagcaccctgtcaaaacagaccaatcagctctctgtaaaatggaccaatcagcaggatgtgggtggggccaaataaggcaataaaagctggctgccccagcca

SEQ ID NO: 1174 - DNA, 516 bp, Homo sapiens
cctcctctctctctctcttttatcatggccatgctaatgggtatgacgttacaattgcctttttactggtttgtttccttcatgactctgaactgtgaaggcaaggactgtgctagatctggtttattattgtactccagtgcctaaaacattgggtactcaacaaatatctacaaaatgggtgagaagacctacagctttcctagttgctttgcttctataaatccaggaaatataggggctagaattggaaaagatattctggctgccagtccacagcactgttcaccagagtgccataggattttaataaccacactaagtaaatggttccatggctttaatagttttacctaagaagttccctgtgtggagaatggcgtgagttctcatttaactagctcaaaatggggaagaacatactcaactctgctggcattttaatctgattccggggagtctttctattccaaacaccttttctgagggcatgcgaacatttcctaatgagaaagc

SEQ ID NO: 1175 - DNA, 679 bp, Homo sapiens
aacattcccctcagaagtgtctcaacactgcagagccactgtgtatagaaaatgccagcttatctgcaggcagaaccaccaggcctctgcagacactgctctcacctttctgcccttccctccatctgtttacatgtgcatgcataattccacattcactgaagtcctcccaggcactgttctaggatctgagcacgacgctgtggcgctcgtggaatctacattcaaatcaattttgacctatctgaaagagaggatacctttgtaggaggctctagacccacactgtgtgtcacagaaagcacttagcccttatggctattgaatttaagttaagcaaaattcaatacaattaaaaattcagggccgggcgcggtggttcacgcctgtaatcccagcactttgggaggccgaggcgggcggatcacgaggtcaggagatcaagaccatcctggctaatgcagtgaaaacccctctctactaaaaatacaaaaaattagctgggcgtgatggtgggtgcctatagtcccagctactcgggaagctgaggcaggagaatggcgtgaaccctggagacagagcttgcagtgagcggagatcgcgccactgcactccagcctgggcgacagagcgagactctgtctcaaaaaaaaaaaaaaaaaaaagaaaaaaaaagaaa

SEQ ID NO: 1176 - DNA, 679 bp, Homo sapiens
aacattcccctcagaagtgtctcaacactgcagagccactgtgtatagaaaatgccagcttatctgcaggcagaaccaccaggcctctgcagacactgctctcacctttctgcccttccctccatctgtttacatgtgcatgcataattccacattcactgaagtcctcccaggcactgttctaggatctgagcacgacgctgtggcgctcgtggaatctacattcaaatcaattttgacctatctgaaagagaggatacctttgtaggaggctctagacccacactgtgtgtcacagaaagcacttagcccttatggctattgaatttaacttaagcaaaattcaatacaattaaaaattcagggccgggcgcggtggttcacgcctgtaatcccagcactttgggaggccgaggcgggcggatcacgaggtcaggagatcaagaccatcctggctaatgcagtgaaaacccctctctactaaaaatacaaaaaattagctgggcgtgatggtgggtgcctatagtcccagctactcgggaagctgaggcaggagaatggcgtgaaccctggagacagagcttgcagtgagcggagatcgcgccactgcactccagcctgggcgacagagcgagactctgtctcaaaaaaaaaaaaaaaaaaaagaaaaaaaaagaaa

SEQ ID NO: 1177 - DNA, 679 bp, Homo sapiens; identical to SEQ ID NO: 1176

SEQ ID NO: 1178 - DNA, 97 bp, Homo sapiens
ccaccacacccggctaatttttgtatttttagtagagacaggttttcaccatgttggccaggctggtttcaaactcctgaccttaagtgatctgccc

SEQ ID NO: 1179 - DNA, 2401 bp, Homo sapiens
gcaggtgggccatgtgtcccctgtccctaggccctctctgtctcctccacacagaggccaagagcctctgcaggatcttgaggcccatgatgttgtttgctcacagcccacttcactcactgtgggacctgcttggtgcctggtgaggactgttcctgcccctagatgtggtctccagcagatatttgcttcagcttatatttttggacaaaggaatggagtgacatggataatatttaaattggaatggactgtgccttttatctgaaaaagttctctaattatatttttcttatcctttttgatgtctcaagaaaactcactaagatccgtttatacaaacatgtttgaatttgacctcacaatggactaggctttgtaggagactgaactcatggtaatgaatattagtaattttggtggaatttttctgtggtaaagaatgaaacaaggaataccaggaggattgggccctaattttccccagaggggtccttcttttaggcctcactttatcttctagcaagacagctgtggtgttagacttctgctccttggcctaaaaaaagctggggccctgaccttcctgggcatgggcgtttgttgatggaaccatggtcagaagaacaaggaaggaggtccatgaggtgggaaatgcacgctaacccgagaaagcatccagcagcaggtcctctgtggccacccagctgcctccatgacccatgagaaacagtagcagaatgcttctagaagagccctcccacctgcctctatcaggcgggatacttgtcatgcatttctcttcagtactggcagaagcccaagcggagaaaacctgactctgtgcaggcagcatggcttggatgttgatctttggaaacaaagaggaggctttcaaaggctgaggggagagctcaggtcatgggattatggaaaggcaattagaggtgttttctagaccaagcccctcttttcatagctgagaaaactacagtttggagagcaaagaagtgagcccaggggatatctaagtgcttatgtgaccccgcacctctcgctccttttgatgagccatgttcgcattttggaaggagaaagggggtgcagaagaggcgtctgatgcaggccctgctgacaggcagtcaagggcatccctcaagtcgatgtagtcaagggccagagctgcaggaaaaatccagcaggcacatctcactggttaggggaaactggcggcttttccgtggtcccgggctcggataatgcatctcagatcaacgaaggataccaaaggcaggtgctttttactcatctgctcccactgactccttcgtccccctccttcctgcttcggacctacttctgatacagtgagggagaaagacaagagtggcaagacagtgtattttctctggaacatagtccatcctcccctcctcacggtctctgcctgagctcagagccccatctgctttcccccagaccctcttgactcggggttgtctgagagcctgcagcattggcatcacctggggcttgttggacatgctgactcttggattccacccaggcctgctgtagcatatcttctactgtaacggaatcgccaggtgatgaatatacacatccaagtgttggtgtgctgccctagaaggtcaggattaacagttggtattttcccgttgtcccaagcacctattctcctttaatccattctgaacatcaactgggttctagtttgaaaacaaaattcagctgtgtctgttctttgcctaaaatccttgcttggcttcacattgcttttttcctatatatcaacaataaacaagtggaatttgaaatttaaagcacaaaaccatttataatagcatgcaagaaattaaatacttaggtaaatctaacaaaatatgcatgagatttatatgaggaaaacgacaaaactgattaaagaagtcaaagaagtcaatggagaaatattccaagttcatggataggaagacttaatatagtcaagatgccggttcttcccaaattcataaatggattcaatgcactcctcataaaaatcccagtgagttgttttttggatacggaaaaactgattctaaagtttatatggaaagggagactgcctggagtagccaacacagtactgaagggcaagagcaaaggaggagaaatgacgctgcctgccttaaagacttaccataaagctacaggcatcaagataggttggcaaaagaacagacagatggatcagttgacagagcagacagcccagaagcagatccacataaaaatatggcctatgaatcttgacaaagaagtaaaggtaatacggtggaggcaagattatcttttcaacaaatggtactgaaacagctggctctccacatgcacacac

SEQ ID NO: 1180 - DNA, 365 bp, Homo sapiens
agggctgggtgcagtggccgacatctgtaatcccagcactttgggaggccaagacaggcgaatcacctgttgtcaggggttggagaccagcctggccaacatggcataaccccatctctactaaaaatacaaaaattagctggacatggtggtgggtgcctgtaatcccagctacttgggaggctgaggcaggagaatcgcttgaacccgggaggcggaggctgcagcaagctgagatcgcaccatggcactccagcctgggcaacagagtgagactccatctaaaaaaagaaagaaaagaaaagaaaagaaaagccacagactagaggaaaatatttacagagacaatctgataatggaccaaa

SEQ ID NO: 1181 - DNA, 2755 bp, Homo sapiens
ttaattttcaagattggggttttgatttttatggagctcaattttggagggccttaggtttggggacacatggtgttgaagtaaacaggtgagaagaagaaaagtgagatttctagaactatattagctgctcagtgagttgggcaattggatatttttggttttatgatttcagattttatagaccagtggaatacaggccttgtgcatatgaagatcaggtgacaagtttgctgcctaccagcctccacagcaatatgccctttcacggtgaggtcctaattttaacaagctaaagaaagtatcaggttaaaaattgtcaaattttatccatttccaggaagaagtctttatgcttacccatctaggcccgtgttttaagattactacaaaaccaagaaaatgcacatataggtcatgtgtacattgactagctactaaaagaaaatacgagattaaatggaatactagaggaaagagaaactttcatgtgagggctataattggggaagggggtgtttagaactaccagttgatgtgatgccagtttcttctataattggatcagaaagtttttgaggcccgcaaacatctaattcctcttgttgtcctgttaataagaatttgactacttggtataggaagaaaatctaaggaaaaaatattttaagcgaatcatttttgttgcattagtgaaagttttcagaagactttttagacaaattggactttctagtaaaaaggctagtctgaataattaggtaaattggactttctagaaaaaaaggccagtctgaataattaggttgttttagaagggcaataaaagctacagctaagttcctgcgatctataatttataaaataattacatattattttgaataacttcacagaatcagtggcaagcagagacttcttcaaaaacatttggaatacggaagtagagattgatgggctttgctttagtctctgaaataatcatatttttctgaaatggatggttaaatttatcatattgttctagacacttggagtgtaataatgaacaagagagaaaattgcctgcccttgtggagcttacattctaatgtcacacacactttgtgcattttagattgttaggggaggagattttttaatgaaactttaaaacctagctgctttcttgtcttaggaactacagtttgaaagagcctacagaagtttgagaaggaggaaggtgtttaccagttggcagtgataggaaagaaagatcttagtttatttcttatttgtaccttttgttattgtcatgaaactttctccatatatttcagttggtaattttaacagatagggatttttttcatgattttaataatgtctttgaaattaataaaacgttgctttatattaaaaaaatcttgtgtcttgaaagttactataaaattcctacatagtattatcccgttagcaaagtatggtaaaacaaaagctagaatatctgttaatttttggttgggatttgtttttaggaacatatctgaaaaatcaagtacctaaatctttttcagttctgggtttctttttcgttttttgagatgggaatctccttttattgcccaggctgtactttaactcctgggctcaagtgatccgccctcctgcctcagcctcctagtagctgggactaaggtgcatgccaccatgcctagtttcagttgtgattttatcaagagaaggtgaaaatttattgtaattagtttataggcgacattaaagaggagagacctgcaaaaaatgctttgttatttaaaccattttttcaaaagcatttgattggcacttttctgctttaatagacttatttgtaatgcaagaggaacattacagaagattttagcaatactttaatcatttagtctgtaggtgtaaaaatcctgggtttctaatagaaggaaagttggtacctggttaaatgagtatatgatttaatgctgagattgtgacttcaagtagtgggtgtctcacctttccaaaacctagttcatagttctcaaataacagtttttcctttttaattttttttcccatctgtcatggtgagtcttactttgttagccaaatacaagtttagttcttaagtggaataactttttttaatacaatcctccctcctccagccctcccatcctgtgccgtggagggtttgtcacgcttatacctacattagatctctatttatgctaatttggaacataatcagcctcttccaggaagggtacatattaatgcactttagagcagtttgtgattgcctctggctatttgtatacggacttgccagcatctgaaaactataaataggaagatttaggaggaaacagactttataactaatggaatacattgtttcagttgaattttttttttttttttttgatggagtcttgctctgtcgccaggctggagtgtagtggcacaatcttggcccgctgcagcctcccctcccagattcaagcaattctcctgcctcagtctcctgagtagctgggactacaggcgcgcacagccacgtcctactaatttttttgttatttttagtagagacagggtttcaccatgttggccacgatggtcttgatctcctgacctcgtgatctgcctgccttggcctcccaaagagctaggattacaggtgtgagccaccgtgcccagcctcagttgaattttttttaaagagcaaaatggaagaatggctaattgaatgtta

SEQ ID NO: 1182 - DNA, 1150 bp, Homo sapiens
caaaaacaaaaaacttaattgctttccagggttcaaatgtaaactacagacaggagattcccataacaacatatgagggctttaggaaaaaacaaaacaaaaacaaccctggaagatttcaggataaatagaagacacgtttttctaccaaacatactttcaaaagtagaaaatcatggatttaaaaacttttttgtagggcttgatatgtctaaatgtatcaagtttcaagtgtgctaactttatgaacacttgtctctgtccttaaatgcataacatgatcttaaatttttcagatctttagaaatgttaagcaatgcaaagatttctaccccatctccctccatatctttaaaagccaaaaaccacctaccaaaactccattactgtttgtgaatgaagaattttcatgacttgaaaaccttcctaatgtcccatcgttaacactaacttttttagaaaggagggctcttgttgtgttctttaacctcttttcacatcataaacttcttcatggttgacatcagtactatcctcttaaaaattcaaatgtgaactaacagcatcatttattgaaggcatattatgttaaaattagtgattttcccaaggacaaaatgttaagtagaaaagtcagtactcagattcaggtgtgactcccaggcccaagcatagcctggaatgaattaagaaggtcaccatattaattttcataaggtgaaagaaaacaagcattatatatttttccacatcagaaaatgttgaagacctaagagactccagtggctggctctgaaccctacagcaagacagtggcagagttggaatggattccagatgtctttgcgaacgattaagaaagagttactgaataactttccattactcttaaaaagttactcttaccaagtgtattgagaattcggagatctgaagtaagacagaaatctttgttttcagttgtctttaagcttttgccagtaacatggtcccagtagaagaaaacataaaactgtaatcctaatcaaattttgcaacatcaaatactatttcaatagtttcaaatactattccaatattgttccagcaatattccaaataatactaagaaatattttaaatgaataaagactaacaatcttcaaaagtt

SEQ ID NO: 1183 - DNA, 1147 bp, Homo sapiens
caaaaacaaaaaaccaaatttctttccagggttcaaatgtaaactacagacaggagattcccataacaacatatgagggctttaggaaaaaacaaaacaaaaacaaccctggaagatttcaggataaatagaggacacgtttttctaccaaacatactttcaaaagtagaaaatcatggatttaaaaaacttttttgtagggcttgatatgtctaaatgtatcaagtttcaagtgtgctaactttatgaacacttgtctctgttcttaaatgcataacatgatcttaaatttttcagatctttagaaatgttaagcaatgcaaagatttctaccccatctccctccacatctttaaaagccaaaaaccacctaccaaaactccattactgtttgtgaatgaagaattttcatgacttgaaaaccttcctaatgtcccatctttaacacttttttagaaaggagggctcttgttgtgttctttaacctcttttcacatcattaacttcttcatggttgacatcagtactatcctcttaaaaattcaaatgtgaactaacagcatcatttattgaaggcatattatgttaaaattagtgattttcccaaggacaaaatgttaagtggaaaagtcagtactcagattcaggtgtgactcccaggcccaagcatagcctggaacgaattaagaaggtcaccatattaattttcataaggtgaaagaaaacaagcattatatatttttccacatcagaaaatgttgaagacctaagagactccagtggctggctctgaaccctacagcaagacagtggcagagttggaatggattctggatgtctttgctaaccattaagaaagagttactgaataactttccattactcttaaaaagttactgttcccaagtgtattgagaattcggagatctgaagtaagacagaaatctttgttttcagttgtctttaagcttttgccagtaacatggtcccagtagaagaaaacataaaactgtaatcctaatcaaattttgcaacatcaaatactatttcaatagtttcaaatactattccaatattgttccagcaatattccaaataatactaagaaatattttaaatgaataaagactaacaatcttcaaaagtt

SEQ ID NO: 1184 - DNA, 593 bp, Homo sapiens
ggatacctaaggtaagacactcagcctgtatttccatacaacctggctgtaattcaaccttctaaaggagtaaatcaggaaaagtactctgttaggtatggaatcatttttagaattatgtgggttgcagtgtaaattcaccaacacactcctatttcagaagtttttcttcctgtttttcattaaataaagtaggtaaaaggcccctgccataatgcattaaccccacctctgtggacaaagatggtcaggatggggtttagaatgcatttacttatgggtcgtggttttccttccaatctggctaacatcagcttaagcttccttaagtaatttcttggtcttcctaactggagctagaagtttgagataagcatgacaaactgttctattctaaaaaaaaattagggaacaatgcatattactacaactagtttattttattaagaaataaattgcagccaggcacagtggcttgtggctgtaatctcagtactttgggaagccaaggtaggtggattgcttgagctcaagagttcgagaccagcctggacaacatggtgaaaccctgtttctacctcccccagctcaaa

SEQ ID NO: 1185 - DNA, 6209 bp, Homo sapiens
tctatggcaccctgattagttgaggcttttagacatccagaagacgaatctaggaagaagaaaaaaccataagtaaaataattcttacttgataaatggaattacaaacttaaaataaaaggctctgctttagcattaggataaggggctaagaatcttgcaaggtttagtattttcctcataacaatgccattgtttgcacttgaacgtaaacagtatcagaaacctagaaatctattaaacaactaatttaaaaatctttatctatattaacctgaataacttatctctaaacatttactctaaaacttaatgagtcggaaggagagtctgcaagtaatggttcctttgaccactaagcatcattgatatatttagttttttatcatgttgatacatttagtaaactttcaataattaccaaagaattctacctcatgtatagtcacatacaagcagtagcaaggctgacaaaaatcaaaacctctcataatttctccttgtagcaaatttgctgatactaagaagtgctcctaatagtaaaagattactctacataaagttgtcgcatttctttttttctttttttttttttttttagagacagggtcttgctatgctgtccaggctggtctctgactcctgggaccaagccatactcctgggattacaggcacaaaccactgttcctggcttgctgcatttctttaaggggcagaagggcagggtggaataatttgaagaatagcttgtttatatctaatagttcttttcaagtttctggaattgaacaggtatctttaagtgaggataagaaaataataattaaggtaaccctgatttgtcattcaaatttccctatgtggtcaatgaccccacttttgaatcaaccagtatctcaagttcaagggaaaacagtcaaaataaggaagtaagaaaatgaacttgaagagttagtgctaagtggtttttccttcttctctttctcccatggcaattgaatctttaatttaatattctatctgactgcctggagaaagccaaagcatattctttttagagaggcctcttaaaaagcatattttatcaggaggttttattacttcaaagtggaaacaaagtagggagtgtggtgaaaactatgccaaaaattatactgtttacaaaacagagagagaaaacatttgtgtgtgtgtgtgtgtataggagccaacatttttcttttaaaaaaatgttaactgacttcaaacaaagagagtaaatttggaataaactgtttaaaatgcggctccaagatcatttataataatttatttccaatctatactggaaaatgccctttatcagactcaatttatttagttttcaagtgtcaaaagttaacactgacgttgggaaatgaaaccactagagataaatgacacagaatagctggacaaaatgaacatttcactgcttacgaaccaacagaaactcctttttaaacctcttaccgcatcctaaaagaagccaagtaaaaattacattatgctaaaaaaaagaaaagtgtaatacacaaggtgtgtattattccagtttgaacaaagtaaaatagctgaaacattagtgtgatttctcgctttctcaaggagggaaaaaaaacacacacaatttttatgtggctcataaataatactttcatttatttttccctccaaatgagaaataaatgacagctaaataattatatcctaggccacaaagtaattatatcctcatgttatctgtattgatctctaatgatggctcatcccttggaggatgttaaaaaataaaaaaatgaaaacgcaagatgttttcaagaaagaaggcaaaggtgatattttaaaactatgcagcaaaacaagccctcctattttttttgtttaacacaaattatcagaactaaaattaattatcaagagtaaaattaaggcttcatccacagaatttcattcttttggagtttacataatggagaaattctatggatctgggagaaagtcctgtagatctaatgtatagcacagtgactgtaattaacaatactgtactgtaaacttgatatttgctaagagagtaaatcttaaacattttcatcatacacataaaatggtaatgaggtgaagtgacagatatgttaactaaacggactgtggaaattatttcacagtatatatgtatatcaaatcattatattgcatgtataccttaaatatatacggttttgtcaattatgtctcaataaagtcagcaaaagcaaaaaaaaaaaacaaaaacaaaacacaccacaaaagataccaaaataaatctacattgtaatgtgattagctcagtgcttggcacatgggcactgagtaaatgatagatattttaaagaaagggccaggtgtggtggcttatgcctgtaattccagcactttaggaggctgaggcaggagaactgcttgaagccaggcatttgagaccagtatgggtaacaaagtgagaccttgtctctattttttaaaataataaacaagtaaataatgttaaaagaaaaatcagtcagtatagttggtcatattaataaaagaaaaatgatcatttcaataaattcaggaaatgtgtttgacaaaattcaacactcattcacgaacaaagaaagtaaaaaaagagaaacttttaagcaaacaaggaataaaagattactctcccaatctgataaaaggcatctgttaaaaatctatagctaacatcacacttaatgcattccccctaatattggggacaaggatagggatcaagtgcaaggaatcacactctcatcactacattcaacattatactgaagttcatagctagtctgataaggcaagaaaaagaaaagtaataaagataggagggaaagaggtaaaactctatttgcagttgaaaatgtctgctcagctagaaaaggattctagatttgagaaaaccactattagaataaatttagcaaggtcacaagatacaaggtccatttataaaaatcatttgtatttacatatatcagcagtagacaattagaagcaaagtcttaaaaactgtctcatttgtaacagtgttaaaaacacaaatgaatttaacaaaaaaatgtgccagatctctacactgaaacttacaaagcaatgctgagaaaaattaaagaagacctaaataaatggagagagctacctaccatgttcattaattggaagatacaatgtgattcagtgcaatcccaaacataatcaaaactgtattttttggtagaaactgactggaaaatcaaaggacctattatatccaaagtaatccttaaaaggaacaaatttggaagacttcaactacctgatttacagacttaccaaagatacagtaatcatgatattgtggcaccggcataaggctcaccaaataaatcaatgaattaggaacaagagatcagacattgagccacacttatatagtgatttgattttagacaaggatgctaaagtaatccatcagagaaaggaagttttttcaacaaatgatgatataaaaaaattttaaaactgacaataataaatgttgatgaggatgtggagcaactcaaattctcatacattgttgatgagagtataaagtggaactttgggaaaaggtctggtagtttatcataaagttaaacatagaacctacctagtcaactcagcaatgccatacctacgtatttacccaagaggaaaaatatatatacatccataaaatgacttacattaatatattcatagcagctttatttacagttgccaaaaaattagaaatggcccaggtgtccatcaacagtagaatgaacaaattaagccttctaatagcctgctttcacttctgaacccttctggtacattatgaaataacagctaggttgttcttttaaaatataaattatatatcacttccctaacatcctgttgtagttggaataaagtctgaactcttaccctgtctacaaggtcctaagatctagccttacttacctcatatcctaccactttcctcataagccagccttctttcccttgaaaatagtaaacttccattttcaaggcctgcacttgctgttcctctatctagggagcctgtatccagaattttatataactctttctcatttttctggctttggtttaaatgtaccctctccagaccacccccaattgcctaactgaagtagctttctttttccccaatctctattcagttaccctttcttatttcttcattgtacttaccacaaactaaaattaccttttgttatttatgtgcttgttgtctttcttcccagggctcagagaaggtgaggtctctgagcacagaaactatgtcctgttgaccaatatgttccctagtacctaaaagaattcttaatacatggcaggtactcaataaatacatgttgactaactagttattggtattcacaaggttgtcttcaaatgttaacacatttggagcccaataaacagtgacattatttatatctttctttcaaggacttaatttagatatttgaagaattcaagaaatttgtaagatctttttttctttcttttcttttttttttcttcagagaagtttagcaagaaatataagacatttcttaataccagctcaggcgattttcttcgagtggacataattagtacattggttctgcctatatttgacttgtgatcctgtcaagttcatcagttaaactgtagaattcatttattctaataaagtcatcacaaatatacccatttttaaaagtggacaaaatacacgaactagtagcttagcacatacctactgtgatgttacccatcttgctttgtaatgttatattacctgccaaaaagaaaaagatacttttatgtactagagacaatctagaaaggaactgtgatacatagcaatgctaaaacatggatgaatatctacaatgttatttttgttggcaatttttcccaatatcacaagtccagtcaaagattgagctgtagttctgaaataactggcttaggtatctctgcaaaccttctttctctactaccaaaccttaagcttttatagcataactacaaatcaccataactgctggcacagaggaaaaacaatacttctaaaacctgtaagtgaaaaaaattactgaaatgtagtcactgtacattttcaacctaaatatcaatgtatttatcagaccacacaaagcgaagttttcaaccaagtaacactaaaatatggtatggaaaaaaagaattacttttatttttcaggccacttgccatgtctattaaattaaaagtagtttctgggccaagaattaaagtggtttgagatagaaataatgaatacatggaggtatgactaacaaaacagaacaaagaagcttcaaagatttccgtcttagtgaaaatatgttttccatgataaggatggaatattgcaaccattcttcccagcccctttcccctaacaccaaaagtagtaggattattcttcatatgtgtgtttgtatgtgtaagtattcctagaatcaggaactcatatttattctactgaaaatataagcaataatgttatctcttctaaaataattccaaaactacactaaaaagtaaaggaataactttggcctcagaattaatcttcagtaaactcattttatctcatttcatataccttatgaatactgacttgtatcagtatctgggaaaaaccaaaaaaaggcactggattcatttactcaatagccagatgcgcctaattgcaaaaatccatctgaaggtctaatataccatcatatttcttgtgagtatatgaacaaggagtatatttgtgtatgaataaaaacttggtttgtgtactgaagcttataagattactaattttttttcatattttagattcaggggatacatgtgcaggtttgttacctgggtatattgtgtgatgttgaagtctggggtacaaatgatcccatcacccaggtactaggcatagtacccaatagtttttcaacccttgccccgtccctccatcccccatctagtagactccagtttctactgttgccatctttatgtccataattatccaatgtttaccccccacttataggtaagaccatgtggtatttggttttctattcctgtgttaattcg

SEQ ID NO: 1186 - DNA, 592 bp, Homo sapiens
ggatacctaaggtaagacactcaacctgtatttccatacaacctggctgtaattcaagcttctaaaggagtaaatcaggaaaagtactctgttaggtatggaatcatttttcgaattatgtgggttgcagcgtaaattcaccaacacactcctatttcagaagtttttcttcctgtttttcattaaataaagtaggtaaaaggcccctgccataaagcattaaccccacctctgtggacaaagatagttaggatggggtttagaatgcatttacttatgggtcgtggttttccttccaatctggctaacatcagcttaagcttccttaagtaatttcttggtcttcctaactggagctagaagtttgagataaacatgatgaactgttctattctaaaaaaaattagggaacaatgcatattactagaactagtttattttattaagaaataaattgcagccaggcacagtggcttgtggctgtaatcccagcactttgggaggccaaggtaggtggattgcttgagctcaagggttcgagaccagcctggacaacatggtgaaaccctgtttctacctcccccagctcaaa

SEQ ID NO: 1187 - DNA, 11842 bp, Homo sapiens
caatagaactcagaacgccagactttctgaagttcttcctcagtcttcttctctgagacttctactccttggtcctagctttgttcctaggcgctgtgccgctgtgtcatccaccctgccctgtacaatatgcaggaagcaagcgaggagggggtgcctcagagagacagtaaggaggaatgaggacaaggtggaattggcatgggcacgtcctacagagtgagaggcaggccttagggcaccacgtcgctctcacgtaggaatgtgtgtccagcagcgcctagccttcagcttttcacaagaactcaggaaattgaattttctatgcgaaatcttccaacttggacatgttggctcaaaaatgttaataatcttgtgtaggccaaacagcatgtctataggctgggtctggcccagacatggcccatgactatagctctggctggttgatggttctgtccttgtcacccttgacttttctttcttctggataaatgtccagagaaacaaatgtcctctcctgattcattggtttcccccaaagatgtggttccctatacacccctctccccaacagctacttcctctgggcccctgtactttgccagctcgttagtctaaaatcttgttttacaggctgggtgcggtggctcacgcctgtaacactagcactttgggagactggggcgggtggatcacctgaggtcaggagtttgagaccagcttggccaacatggtgaaaaacctcgtctctactaaaaacacaaaaattagccaggcgtggtggtgtgcacctgtaatcccagctactcgggaggctgaggcaggagaatggcttgaacctgggaggcggaggttgcggtgagccgagatcataccactgcactccagcctgggcgacaaagtaagactccatctcaaaaaaaaaaaaaaaaaaaaatcttgttttacaaatgatagccaacccatctagtgcccttcacactcctgggtgctgtttttcacagccatgtgttctgttaagcagattgcaggcagccctggtttgcgttagtaatttcttagtgaatgggtagtgtacaccaggtaaacctcattctcaccccatgagtgtagggcacacacaggctgggttctccaggagcctgtctgcagcctgtgcccacgaggacttgttcctagaagtacgtgaagggatactgtctgctttctcttcgggtcatgcatgcacagaggacatgccgcgccccagcccccagcgccttggcctgcagagggcagagctgctgtgtggcacagaactcaggacctatgagcctccttgggtggcccctcctgcctgctgtggcctctgcggccctggccttgacttcctttcctgtcacttgcgtgcctctgccactgggcctacctctgcccgagtggcaggagcttgcagctttgtatatacgggcagttggtgactcattcctcagcagcccctcagatagggaagtgaaacagccacacctgatagggcctgacctttgggtgacagcagaagtagctaagcagacatgaggcttgcagctaaggagggaagtcctctctcaagccagcctgtgaagacagcacctgcctgccctgaccctcctgtggcctccaggcctgtggctctggtaacagtttcttcctccctccccgccacccccttcttcttggtgacagctggaagtagcagtggtcacaactgagagagccaaacatttctacagcccccaggacattcctgtcaccctctacagcgacgctgatgaatgggaggtcagtgctggggcccctgggctgagttccattgagtttccaccagcaggacagaacagtcctccctacggcctatggtctggcagctggaacagacaggctgggctcaagtctgtggtcagggccctctgggcagaggcaatgaagaaaacatctgtctagcttctggcctgcaggaggccctagtctcctcccggcccaggcagagctgggctttggcctggtgcctgaggttgagtgtccttgtacttatctgggctgatgaaaccacagaggagctctgttcccaccacccttgtccacgtggttcctggcgtcagggctgaagagaacgcctcacttcccacggccgccgggctctgctgcatctcccctgcggatgggtgggcactggctgattcaccagacgctgagtgtgggcctcacaggggttccctgccaggcattttcaaacattcttagcctagaacatttccggctggcctgtcttccccgcccccaccccctccatttctcactgccccggagctttccactggcttggacaacccaagcatccgcctcaagcagacaggccgggagctccctgccagatgtcagttctcttgaaagccaaaccatgaagggaatagctcagagagacaaggggcacttgtttcctcaggcctggttctctcggctgctggctccatggctagcgctcgccagcttagctgcaggagggaacggaggttggcctgggcagggcaggtcagtgggttcctcagtctcctgacttaccgtacctggcctgccttggcgctgcatcctgcttcctccacactgacccctttttcttccctctgccagatatggaagagccgctctgacccagttctgcacattgacctgcggaggtgggcagacctcctgctggtggctcctcttgatgccaacactctggggaaggtggccagtggcatctgtgacaacttgcttgtgagtgatgtcctggtgccctcgtccgtccctgggcctcacacccagtttgctgagctgcagacatccttgtacaaggagacctgctgctgtggggccccggtctgcccagggagatcgtgctccgccattccccacatcgcccccagtgctctcaccttctctgtagcacatgggcacagccctggtcctgatgggtcagtgtgacctgccactgctccccaggagtgtccccctctcccctgcccttgcacccagccaggtgcccacaggaagacccttcttccttgctctttgtccctcctcgtgggctgcctgggtgtgctcttccactgtctctgcccagccccatcgcctcccgcttcagctctgccttctccgcagatctgggtatacacgtgggcaatgtaattgggggttcacttcttcatagatggctcatatacactttatcacccttgtagctttcctgtatattaggggaagcttagaggggaagaggggagaaagacggggcagtggcgagagccgatgggtggtagggagaaatggaagtccagctgtccaaagtgggcactgtcctaggcctaagatgcctccagggagctgttgcccttaaaggggagctgcctttgtttatatgatcgtcctgggaagatttgggtgtgatttctctcctccttctccctaattgccaccccccacctcatttattgagctttcgcctaccacgtactgtactggggtctgttctgagagcctcacaggacacagggagctcccaggctggaaggagaatgccaggcttgatcacccatgccgttgggaagggagtatcctctggtgaggggtacagtcctgaatgaccccagtcagtcctttctatggagtcaccaccttgcatagtgctgggcctgtggtagacatccaataaatacttactgcatgtatgcggtaactagcagttttacttttgcgagtagctgggagtttttcagagtttcatgtggtgaagaaggtggatgatgaagctgggacaggatgttttttggggtcacagattagtgttcttgtatacttgtcaatgggctcttaaggcactcctcaaagaatctgccagtgatttaagcatcatttgaataagagcacagggtgagcagaagaacaacttgtgtggccaggagcaggggtagggagtgcagagaagagagagcctgggtgcaatgtcatcaagaaggctttccctatagtcccagctacttgggaggctgaggtgggagggtcgcttaagcccaggagttctaggctgcggtgccccttgattgtgcctgtgaatagccagaatagccagtgcgctccagcctgggcaacatagcaagaccctgtctctagttaaaaaaaaaaaaagggaaaaggctaggcatggtgcctcatgcctataaccccagcactttgggaggctgaggcaggaaaattgcttgagcccaggagtttgagaccagcctgagcaacatggtgaaactccatctctacaaaacatataaaaaaaattagccaggtgtggtggtgcatgcctgtggtccccagctactcaggaggctgaggtgggaggatcgcttgagtccaggaggtcaaggctgcagtgagctgtgattgtgccactgtactccagcctgggctacagaggtgagactctgtctcaaaaaaacaaaaaggcttcccagcagcactggtgccacaactgacatggcagctgcagctagaacagttgagtttcttggctgctctcatcaaattgggtcagagttgtgtgtggccagcaccatctcaccaaatctccaggctccctgctggcgggtcagcagcagctggtgtgacaaagtactggcctctgggagctaagccccggcctgggccagctctgcaagggcgctttccttcttcctgcaagctctgcttccccttttccttctaagctgccatcacttcatgaaatccctgggcttccctcctccagagttggctgggaagtgaaacatgttcccaagaccagcccccagatcatttgcctcaaaggttttccctcgaagtcacaaatgtttcaaggaatctcaaattttacaaagtttgaagtgtgggcattggtggcctgtggctgtgtcctctctctgtagctgttttctccctacatccctgaaaggaagttgagcctgctcctccatccgcagacctccctttccagcgcccagggcatggggtgctgtgagggcagcatgctaggtgtgaccgtgctcctggcctccaggcccgtgtccctctgtcctctagcccactaaggccctggcccatttgtgctaaacaggcagtcggacctagaaagagcagacaatctctctgggtcaccagtctggctaggagctggtctcctgactgggatccaggccttctcccctgcccatgtgaattcccaggggcagagcctgaaatgttgaacacagcactggccaaagagatgtcaccgtgggaaccgaggctctcttctcctcctgcctgctttcgtgggttcagagtagctgaggcttgtctgagaggagttggagtgctggttttcaccctggttggtgtgctttgctttgagggcacttagaaagcccagcccagcccttgctcctgccctgcacacagcggagcgacttttctaggtatgctcttgatttctgcagaagcagcaggtggcatggagccaagaggaagtgtgactgaaactgtccactcatagcccggctgccgtattgagagggcttggtgggaaactaatgctggtggctgatgcaagcagccaggtcccagggctgtttgctgtcctgcttcctccctgtccctgggacttgggggaggtgctggtcctgtcctgtcggggcattgttctctggactccttcgctcttttcccagatgagcttcccttcaggggaggggtttccagcctgttaccctgaggagctcacagccctggaagaggtgtctggagtagtcagagcactgggagcttctctctcccccaggcggcccccagcccagggagcctgtgcctgtgggaagcccaggagtcactgccctggagcctgtgttttgtgcctggccctgcgctcagagctttgtagccattctcacctcagtcctcacagctgcccagggagggacctttctagagaggaagccaggccctggccttcagtcccatgtccaggttctcacagctagtaatacacacacagctagtgctctcacagctagagcacagtcaggatttgaactcagggctacgtaatttcaaagtccgtggcacaaaggactctgtgagctggatggctcctttcacaactgctcaggtctgtggcttggtgggacggcctggatttgggagatggtgaggctgtgcagtggaacattgcctgggtggtgcccattgtccgggtgtgggcgtggatgactgcttacctctcagggagcagctccctatctgtgaaatgggacagcaccttctttataaggtctcagtgagggttaatgagatcctatatatgagaaggttttggtaacggcagatgttttcattgccagactttagttggcctcggagagctgatgtcaagtagatgagccccacctgaggagcagcctggtcctttgctttctggtgcaaccaaaaaagcctgccttctgctccccagggttgcttttcccaggaggtgtgagcctacctggaggaggcttaggcacagggatacctgctggaggtctgagcgttggttgagcacctcctgtttgtaggatcctgtgccagagcctgtggggaggtggagagaggcgaggagacatagcccccacccctgagggatgagacagctccctgcaggcaggctgtgcccagtcatctcaagcctacagctgggctgctggctgcagggtctggagggcggtggggagggtggcagacagagtagcaagacccccacttccctggccttcttcacagacctgcgtcatgcgggcctgggaccgcagcaagcccctgctcttctgcccggccatgaacaccgccatgtgggagcacccgatcacagcgcagcaggtagaccagctcaaggcctttggctatgtcgagatcccctgtgtggccaagaagctggtgtgcggagatgaaggtgggtgtcttgccaggcttatagcccagggctgtagaaggggctcagctttggggtcatatctcagttcagttcctggcctgttaatgaccttagcaaaccattctctgagcttagctttctcagctggaaaatgggaatcgtaattcctgcctccagattggtagggtaaaatggggtggaatgtgtaaagtacctggtagagtccctggcacgcagcccacacgcagttaaggatggctactggaacgagtcccagggtcttgccaggggtcttgggagagatctgatgtgtctggctcaggcaaagacagaccttgccctctcaggccttgggctctgggtggagcacttggagcaatgggcaggggtctgcagggctacaggcactgttggcctgtctggccacagcggaattttgctcccaggtctcggggccatggctgaagtggggaccatcgtggacaaagtgaaagaagtcctcttccagcacagtggcttccagcagagttgacctgggatttctgtcatgggtgtccctctgtactcagaatgggttcaggccaagtcggtgaagatggatgttggcaaaataggaggataccctcatttgctgaatgggggacctgctctgagcctgcccaggggccaggcctgctccaggttaaactggacggaaggcccaggtctcagtttctttcaaccaggagaggccgctgcctagagcccctccccaccttttcctggatgggtgaggcaagccaggagagcaagcagtgttgtcctcacgggaggaggactgagcgactgggaaaactcggctctacatctcacccagaacggcttttagaaacaccacagctggagagtcctggctgagccttgggagtttcagctctttggcggggtgcccaggtgccatgcgatcagcgaagcctgcgagttggcaggactctgaggtttcctgcagaccatgccatgagattgaaggtgcggggaaataaagaaaaatcaccatttaggagactccattctttccctacaacccagctgtggtcccagagatcagggggtgttgccaggtgtggctggggaagggtctgggttcacaactcaccggcactctttagtccccgtataacatggtggttaaggataaagatctgaagccagacagcccctagttccaatcccagctctgccgcttactagcagtggcagtttggttcaggacttagccttcctgaccttcacttacctcagctatcttgttatcctaccctcagggagttgttgagaggattcagtgaaattttgtgtgcagaatacccatgccactgagtgcctggaacgtagtaaatgtcaaatcaatggaagttaaaactaggcatgcatatatgccagagagctttcctagcatttactgcaatgccctgtctcattttgggaaaaaggaaatcctggatgctaagttgacacatccctttatgcaagtgacaggtaagcagccaggagggttgaccctgccctgggtcccaggcctcttgcctgcttcttggtttcctctgttctcatcctttcagctttgctggacctgaggcaggggcctgggtgtctgtgcctccctaccccccagtacacatgaccaagggaagtagatccagagacaccatgcactctggcccagaaaccctctgctacccagcttttgacttaattgccatttggtgtggctgcagcggggagggcttgtctgcgtatttggagctgaggctgaggctggcttcctgccctctggcttccaggccaggtgtgagggacatcccatgtgggctctgagagcactgagagtagaggtgccttgaggggaccaggaagcctactggctggaatcagtgctccagcagcctccacagcctttatctcaacagcacttgacttcaccaggtgaccctttgggataaaattgccttagggtatgaaataaactataactaaaatggtagcatcaagaaccaacttctttggctggtttggggatggggcatggggagaacctgggtaactgaaacccggagacggtcccaaaagtccatttacagggtttccaaattccttcttgtccacattgcccttcctctccctcagcaacccactagtaaatggtgaggcttcccaattttatttttatttattttttgagacggagtcttgctctgtccccaaggctggagtgcagtggcgcgatcacagctcaagccattctccctcgtcagtctcctgagtagctgggattacgggtgcccgccaccacgcccagcttatttttgtattatttgtagagatgggttttgccatgttggccagactaatgttgaactcctgacctcaagtgatctgctggccatggcctcccaaagtgctgggattacaggcgtgagccaccgcgcccagccgcttcccaattttaacagaaactgatagcattttctgagtgttcatcgtgggcgaggatctatgccagggattttagggaaggcagtcacccagggagatcaaccacaaagtgcctgtgtgaaaaggccatgggagcagggaagttcacaggccactgtcccagagctctgaaaacagctgtggctgctcagcaggactgcgccttgttggctagaagggaacatatatccctgtggactcaggccagctggaggcccctgtccctgggggttcgtctctccatctcctacccacagcagtcctgcatccctgccgcccattttgaagcggggggtctggatgaatgggtctgggctgggcctaaagagcccagctgttccctgcaccagactggagctaagaggagcaggtgctgcatttagctggccccatctgccaaggaggtgctgagtggggagtgacaatcactgctttccccacgaggggtccaagcacttgaagttaccttcatcttggggagaaatgtttctcagagaagattctagcctccctgatgattttttatagaattctggaagtttcagagaatagaacatttgggtctgaaatgtgcactcttttgtggcagccatgagcccttcaaggctgctgtggatgctgctgggtgggaggcagaagccaccaaaccaaggcccagcttccaccctgggccgcctccagcccttcctgcaccccgctggtcaggtgccgctgctgcctccccactgcctcaggtcaggcccagactcctgggcagtacacacctggccctttgtgatctggctcctgcctacccttctagcactgccctttaccacatgccaaccctgaagggctccgtattctcttgccagactggacaaccttgaacttgtgaggcctcttgcctgtgcacatgctgctgcttttactgggataagactgactcccacacatgcctgtggatgtacctgggtgctacctcctttggaaagccttccctggccaactgcaacctccttgcccaggttgccatggtgcttcccactattattttttatttttatttttattttttgagatggagtctcattctttcgcccagactggagtgcagtggtgcggtctcagctcactgtaaactctgcctcccaggttcaagcaattctcctgcttcagcctcctgagaggctgggattacaggtgtgcaccaccatgcccagctttttttttctttttcttttttaaaatttttagacggtgtcttgctctgtcgcccaggctggagtgcagtggcatgatcttggctcactgcaagctccgcctccctggttcacgccattctcctgcctcagcctcctgagtagctgggactacaggcgcccgccaccacgcccggctaattttttttttgtatttttaatagagacggagtttcactgtgttagccaggatggtctcaatctcctgacctcgtgattcacctgcctcagcctcccaaagtgctgggattacaggcgtgagccatcgcacctggcctgattttttttttttttttttttgtatttttaatagagacggggtttcaccatgttggccaggctggtctcgaactcctgacctcatgatcttcctgcctcggcctcccaaagtgctggaattacaggagtgagccaccgtgcccggccaccactatttattacaacagaattgtaattgttagtttactttgtgtcctcctaacattgggttctcttggagagcaggagttgtcctgttccttacagaacccagtaagtcactccaagcttgtactgatcaaaaaagtggtgtgtgtgttggggctattggttcctgctcctttctgtgcaagagacaaaatttagcaaccacaaaagcaaagattgataaatttgactatagaaaaataggttcactgagcaacaacccaaagtcaaggtcaaaggacaacatgctggggaaattatctgcagctcataaacaaagggctgattctcctaatatatgaagaactcctatgcattgatgataaaaagaccaagggccgggcacaatagctcacacctgtaatcctagccctttgggaggccgaggtgggtagattgcctgagctcaaggagttgagacccacctggcctacctggtgaaaccctgtctctactaaaatacaaaaaattagccagacatggtggtgcatgcctgtagtcccagctacttgggtggctcaggcaggagaattgcttgaacctgcgaggcgggggttgcagtaagctgagatcatgccactgaactccagcctgggtgactgagcaagattccatctcaataaaaaaaaaaaaaaaaaaaaagaaagaaaaa

SEQ ID NO: 1188 - DNA, 268 bp, Homo sapiens
ttctttgtttttttttttttgagatggagtttcactcttgttgcccaggctggagtgcaatggtgcgatctcagctcactgcaacctccacctcccaggttcaagcgattctcctgcctcagcctcccgagtagctgggattacaggcatgcgccaccacacccggctaattttgtatttttagtagagatggggtttctccttgttggtcaggctgatctcgacctccccacctcaggtgatctgcccaccttagcctcccaaagtg

SEQ ID NO: 1189 - DNA, 479 bp, Homo sapiens
ggagcgtaaattgatggcaacttcactggagaacaatctcggagtatctatcaaaactacgtatgcaccttaccctttgacccagcaattctacttctagggatttgtcccacagatacactcacttctatgacattatgtctaaacagatttattgcaggcttgtatatggtactgaaagaccaggccaggcacagtggctcacgcctgtaatcccagcattttgggaggccaaggcgggcagattggctgagctcaggagtttgagaccagcctggcaacatggcgaaaccccgtctctactaaaaatacaaagtcaggtgtgatggtgcatgcctgtaatcccagctactcaggaggctgaggcaggagaatcgcttcaacctgggaggtggaggttgcagtgagccaagattgcaccactgcacttcaacctaggtgacagagaaagactctgtctcaaaaaaaaaaaaaaaaaa

SEQ ID NO: 1190 - DNA, 6500 bp, Homo sapiens
gatcgggatgcaagatttttgagactcactggtctgaaactgcctttcctcttaaatttagttaagtatttccctgggcatggaattcaaaggtggttatgacttttcttcaggattgtgaatgtatttatatcctcccatcttacgttgctattgagaattctgaagttcttctgattcctgattctttgtatgtgtattcctcattccacaccttccccagaatgcatgcagaatttcttcctttctattttcttttctctttttctgaaactcttattattgggatcttctgcctcttggattagggctctaattttccgacattttctctgctattttttactactttatttttctcctctactttctgagagatttcctcctcttgatcttccaaatcttgtactgaatcttttatttttgttaacatgttcttaatttccaagaactcttttttcttgtcttcggagtttcaacacttattgttgttttgtgcatgtattattttttcttctctctctgaggctatttaggaaattttttattgaagctcctcccccctgcttccttcaagttgcttttatctgcttttttatttgctttttcatgcaataagtttttctcacatgtctggtaactcttggggattaccaaaaactcatagaaaattctgaccatgtgagtaacacttgccaattttgagcttcatgatagaatgatctagctggaccttttgctgcggggaaatcggaggtaagtgtctttggagacttcctcttgggatggtcaggtctcccaggtttcaagattcttctaatttccttcttgaatcagttgcctaatttaggaaataaaaatacaggatctccaggtaaatttgaagttcagataaactttgttttttttgagagagtctctttctgttgccaaggctggagtgcagtggcatgatttccgctcactgcaacctctgcctcccgggttcaagcaattctcctgcctcagcctcccgagtagctgggattacaggttcatgccaccactcccagctaattttttatatttttggtacagatggggtttccccatgttggccaggctggtctcgaactcctgacctcaagtgatccgcctgcctcggcctcccaaagtgctgggattacaggtgggagccactgctcccagcccagataaacattttttttaaaaagtgtaagtatgtcccattcaatatttaagacatacttatactaaaaaattatttgttgtgtatctgaacttcacatttaactgggagtcttgtcctgtgttttacctggcaaccctattcctgaaagataaatccttgctgacagcattagggatccaagtgaggaaaatggccttgcaaggtgtgggtgggggtggagggggaacgttttcaacattcagtgttatttattcaggtaatccccttcaactatgtctcttaaactttcatctaaagaccatccactttaccctctctggaaacattctccgttatttactggagtaggggaggatcagttatctggttttttggaggacttagtatccaaggcatccttcacaactttctgctcatttattttcctttgactgccacaactttactcctagctctaggtatagagcagtcccagtgattaatttgagtgctttgcagtgtagatagggattcttggctctttctactgctagtttaggacctggttttcttgggtctgctgaatcaattactactttttgtatcaacatcctagtttttaaaactgtgttgtggtctatcctcctattttcctacctttgtgggttaaaaaaaatagtgttcttttgaaggattgtaggaaataaaattgaagcatatgttcattctacctttacctgaaagttacttctatcccatcttaatacacttgcactgaagtgattactttccacctgcaaagtggaaacaataagaccagttagcggctgctgctttagtcaagcaagagatgaaggtgacttggaatatgctgtacagatggcattaaatgaatatggatctccttttggaaacttttcatctgcatggtgagatgactcacatacttagattttatattcaaatagctacgtactatagtggaagaaaaacttaatggagaagtgtttcagttcttgcgcagtatagaggatatgacttttccagattacaggggttgcctctaggtcaactctagggctcattacaactctgaagctcttttattgtgtgaaacaggcaataagatatgatttacacaggtgcctaaattaaacctttaaacacattttaaattcttgataattaaaatcattagtaacttgagaacaatgaagatatagctgttcatggctataggccaaggatctgattgcttttacagggctaatctttttgacagtgaattgcaggaggcactggggcttaaagccctttatttttattattagttgtattaattattcagtgataaactggatgactctaatgaagaagtaacattattttaccaaataaagtggcataggcatttttctagatcaagagagtatttcagttgactttctcatgttttttttttaagagcatctagcagtttatttaattattttattctattttttatctttaaaatttatcctagctttattgtcattaacaaatgaaaattgtatatctttacagtgtatgatgtgacgttttgatatgtgtacacaccgtgaaatgattaaatcaagcaaattcacatatcccacatgactttcttatgacttactggttttcatgacttccctagatttgtaccctgttgaaatgtaaaacgactaatttaaacacttgcggtgactcagctgaaacagcttctaccaggtttgaaatgttctccctcagtggcactttcggaacccagtatgtctttcctgaggtgttgctgagtgaaaatcagcttgcacctggagaatttcaggtaagaatcttcgaatattgccaattagtttcatgtaagaggaagcactttttgatataaaaatctgctcaagtgcttacaaatatcataaaatttccatttagaaaggttaagattatccttggggatcatgaaggacattgagcaggctgcatttcttgtctggaaattcttaacataataattactgtgtccttcagaataaaaaaatatatatcttattttggggattatagggagtttaaagtcttccaagtagaaagaagattcaacgagagtagtttcagaaccagtgccattggagccccttaggaccactggggagtgatggcctagggaagttgaaaggagtccctctcgtcgagtgagtcaaggctctgtgtgatggtagaaggaaaagagacaaggaaaagctgaagaagagagaatttgacagtggcggatgttagcaaaaaagcaaaaactttttaaagttcagaaataatcccttgcttcacatgtgctctgcccagccacattctttcgctgacttcctgcaagttctcctcccactccccgttcctggtagaaaccactgctggggtgtgggaggacaatggaatggtgaggaggttgtggtgagcaagagacaggagatgacagatgctcagttcaaatccctgttagtcaattgcttcgggccattgtggggagtctttatcttgtctgagaggactaggtttctcttctgtatactgccaaatccactggtttgtgtttattaactcttacggcgcttccacaggtaagtaaattagaagacattgattacgggcatctcactaataaatgaatcagtgccagtttcatagctccaatttttcttgtacttggcaacatttcaaatttttctgatagaatggaatttggccagtatttttgtttcttcattctgttatagtaaattttaaaagtgatttatgggattgtaaaacttgaaggtagcctttgcctacttttttgttttaatcaggtgtcaactgacggacgcttgtttagtctgaagccaacatccggacctgtcttaacagtaactctgtttgggaggttgtatgagaaggactgggcatcaaatgcttcatcaggcctcacagcacaagcaagaataataatgctaatagttatagcacctattgtatgctcattaagttggtagaatattgactttttctcttttttatttgggataatttaaaaaatgatggatgagaaaagaaagattggtccgggttaatattatcctctagtataagtgaattactagtttctctttatttagacaaacacacacacaccagataatataaacttaataaattatctgttaatgtagattttatttaaaaaactatatttgaacattggtctttcttggacgtgagctaattatatcaaataagtatcacaaatcttttacgcagaagaaataaaaactacgggtagaaaacataagaactatcataaaatttacttacaaggaggctgctcttgttaccacttttattatattacgtatcacttattcagctctgctgaaaatttccaatgactttgtttgtttgctctttttgttttttacctaaacaatacattttgattctcttgtgggttgataatgtctccccaaaatttacatgttgaagcacctcagaatgtgactgtatttggagacagggtctttaaagaggtaaaataaggtcattaggatagaccctaattcaatatgactgatgatcataaaagaagaggcgagtagggcacaacaggcacaaagggagaccataaggagacacagaggaaggacaactctttacaagctaagaagagagggcctcagaagaaaccaaccctgccaacaccttgatcttggacttccagcctccaaaactatgagaaataaatttctattgtttaagtcacccagtccatggtactttgttaggcagccctggcaaatgaatcaaagacccattcctgttcctctccccaccactactgttttctactgtaatctgaagcttcaacaaaaggcttacctggtaagaatattcagctggtctgggtcctcaagactccaatagacactcttagagaaggattgctgatggattgatagtgaaaccattagatcattgaattcctctggaattagaaaaccagagagtcccattttaagaaattagatatttaatatagcattgtgtgttctattttagtaacagcagaatctcttgacattacacaactcagtgaaacaacatcatttaagccaaaatatctcccaactgactgatagactctgagcactaatatcatagtgctgtgatgatggacaattacatagtaccgataacagccatgcactgtgcaaagcatgcccttctgcacaggagagcaaggcacttgcagtagtgatctatgccagcaaaacatcattttgagacaaacatttttgtggcagatgtttttcctaaaaagtactatatcatccaagaaatatttgagtaaaatcccttgttcttttgggtgacattaactgacatttgctttttttcaagacctaatagaaaataagaaagcccataatgtatttagaaacaggaatcctcagagcaattctctgtattctcatataatttcaatgtaaaacagaaaacatattgatgtgttggtgataggcttgaattattaaaaacttcaaaaacatcctaagtgtttcttttttgctcaacgttgtcaactatagtaggtctcccttgtggtgtaatgaattgcccccaaactattatcttaaaacaacaaacatttattatcttatagcatttctgagggtcaggatctgggactggcttagtggagttgttctggatcagggcctttggaaagttgtagttaacttgtccccagggctgccatcatctcaaggctcgggtggggctggagaaaatctgcttctcagctcactcacggcggttgccaggcctccattctttaggatgctagaaaaactttcataaaatgtcatctggcttctcctagagcaatgatactgagagagaaagcacatgagagaaagagcgagggaacttggatgtaagccacagtctttgaaaacctaatcacagaagtgacatctcttcttccacatgatgttggtcacatggaccaacaatggcacaacgtggacagaatcaaacagagttgagaatatcaggaggtggggcttcatgggggccattttggatgctatcatagtgaatatatgtatttatatttatatctgtatatattgcaatgtaatttaaaaaataggattgttttccttttctttttgctatatgtgatatgtatttcaaaatacactcccaatagttacgtctgaaaagcactacactaaaaaactttctatacattgaataattaaattaaataatctaataa

SEQ ID NO: 1191 - DNA, 531 bp, Homo sapiens
cttaatgaaagaaagtaacgatttatgggataaaaatattccagtggtttgtatttgcttcatacttcaaaagtgttagtccatttattgtttaaagttatattgaaactgatattttcactgctgccaaagcagtacctgacagtagataggtatccacagtcttatgttccttagagttatagaactatgcctctgaaaggggttttaatactttaataaacctggcctaaactgttttatttctaagttgaagaaactgattgtcaagtactttgacttgtccaatctcatacaactaactatggtacatctagagttagatctcagtatcaggggtcccagttgtattctgctcaccattccacaatttcgatattgataaaactttcacactaacttttgaactgtggttattattaatttagttgattcatgtcctcttatttatctccttactcctccactgctgccttcataactgtccaccagatcaaagctatttgggtacctacactttaaagtgagggg

SEQ ID NO: 1192 - DNA, 1198 bp, Homo sapiens
atttcatgtgattatgccattttgaatatgtatattacatgtaattgtataatgttaactcgggtaggcaaaattcttggtattaaatttaggatgttttaaaaattattaagaagatattaatgtctgctttttgatagcatatattttcatgtaatgtttagtgtattaaaatcaaccattcaagatttattttattgggtgacactattgactgtgttccaaaatgcccatagtgttaggaaatgtggtgtgagttttatttgtgggctaaggataaaataatcatatgctaatataccttttattataaatgactaaaaatttggatataaaactgatgttttactacacaaattacagagagagataatataattatataattattaaataattagaaaatgcaaataagcaaaagtcacccatgttcccagttctcatctcctgaagatagttataactaacatattattttgtactcttcctgttaattagtttctagtgtactttctcctgtagctgaaattaagctgagaaaaaaggaagagatagttcctccctcctctttctctctcccactctgtctctctcctgtgctatctgtgtgtatatacaaatatgtatgcatatatatataatgatgtacataatatatataaaatacaaatactaatgtgcatattttcaaacatacacatattttttattatttgaaataagaatgagtcagactacatatttggtagccagatttttttcactcagtgatatatcatgaacatatttccatgctaatataattttctaataattttagatgctgtaactacaatttcattgttaatgggcaatttgttgctttacaaatggtaaattatatgataaataatatgatcattattcttgtagccaatatcattattagaaatgatggaccgcattaaagctataaaattaaataagaatttataaatgtaaggagttattcagacatcttgtatctagtattacaatatcagaaaactcagcaggttatatgacatatacactttgagatagtcactcagaggttttcacatacaggattaaccttgctgcagtgcgtgtgcaagattaaaaaagatgtcacgggtcactttgtaatgtcatatcgttgctgttgataaataaaggaaatgttataaataaaactaga

SEQ ID NO: 1193 - DNA, 1672 bp, Homo sapiens
tctgaattctatctcactttattatttcagtgataccaaaagacatcaatgtcacagtagtgatatacttatgtattagttatggaaattccacaggagttcaaggtcattatcactataattattttcctgactaaagccataaaggtgatttaggcaattattgtcatcttagctagtcctgttttatagcttatattcagcagacagctgtatgggaaggtaaatatgttgacaatgtccacaaagcctttatttatttatttatttgatctctgcatgtcctcgtagtaactggtctcatacttgacctggtcatctggtttaagacagaccaagtgtatgctcacggagctgaaatgcattagtcagttgtgcaatgaggagatgatggatgagaatatatagttcctatttattgagcatctaatatataatctctactggacctttacaaatgtatttaacatctttacaacaacttttcagggtaggtgttaccggcttcatcttacatataaaaatactggcgctcagataaaccaagtaacttaccgtccatctggagtgtgcctgagttgagatcaaacgggattcagtacgtctgactgaatctgcctccttctgaaatctctatgctctttttcacacttctctgtagcctcagagactgccaagttctgtcaagacctctgcataatatcaacgttacaaacacgttttaacttttagagcctaaaatcatgtattgttatccaaagatgatctttctctacagaaatagctgcttgttcttagagatggtggaggtcattaaatctataaagtgagataaaaatccataagatttcatgagttactcaggcatcttataactactatcagaatatcagaaaactcagcaagttatgtgacaaaggctttgagatgatcactccagacgttccacatactgagcatcagccttcttgctgcagtgcatgtgcaagataagatgtcataggcagctttgtaagattgtatcagtgctatagacaattaagagaaatttcatagataaaactagaaccctttctatatggccagaactgtaatactttatgaaattgatctgattatcagcaatatgtagtatcagcatggaatttaggacctctcttactcattcctgtgtcccccatagtaccaaaaacagtgcctgccaaaatagattaaaagtgtttattgtattagctgtttagagctgaaaagatatttacaaattccagggaagtaaaaggaaaaaaactgaaaaaggtacagctacttttggggatgtgagatcatggatgtgtatcttatagatttcacattatttatttactttccattattttcttctacattatcatatttagtggctaaccattattacttcttaggttgttgtgagaaccgagttaattaatgtaaactatttgacacataataaggacttaaatgttcattgttgtcattattgatttattaccatgagccctacatttccccattcatgagtgtgcgaacattaacatagatagggttgataatggttatttgacattacacatttttaggaagaagaaatttctgtcttgctggccagtccaggctgtaacactcaaaaaaacaaaacaaaacaaaacaaaac

SEQ ID NO: 1194 - DNA, 390 bp, Homo sapiens
ggcctgacggaggacgaggacgtgcgcgccatgctgcggggctcccggctccgcaagatccgctcgcgcacgtggcacaaggagcggctgtaccggctgcaggaggacggcctgagcgtgtggttccagcggcgcatcccgcgtgcgccatcgcagcacatctgtgagaggccggggagcgccgggcggacagggaggtggggacaggcccggtcctccgccctgacccgaccctcctctcagtcttcgtgcagcacatcgaggcggtccgcgagggccaccagtccgagggcctgcgcgcttcgggggtgccttcgcgccacgctgcctcaccatcgccttcaagggccgccgcaagaacctggacctggcggcgcccacggctgagga

SEQ ID NO: 1195 - DNA, 1964 bp, Homo sapiens
gctactcgaccaagaaaacagaacaaaacaaaaaatcgtgttttctctaattcccttgtggaatgtaagtgaaatcagagtcctaggctaggaagaaatacgtaggtaatttttcttgtgttggttttggtttctgtcatgttgtttattggctatagattctgtcttttatgttatctgacttttttagagcgaataattagtttctgtccacctggatttaaatccatgaccaccttcttgctctactctgaagataatcagtaagaacctttctttctccagttctaaaacgttctcagtgtctttaatgtgtgtttattttcttcccaattctttcaaagatttaactcccacgatacttttttttccccaggaaacaccgcaaatgtgtggaatataattcaccagtttaattatgtgagcatgttgagtacttacatgcaggtccattaatttttcactaacaattattttttcatgcaaaagcaataaataacattgtgcttccaaaatgttcagaatacatttgggtagtaatactttcctagatttacaataattattgaaattattattatgacatctttaaatggatacacaggtcagttacaacataaaaaatgtaatggtggaaatttgtcagccttgaattcaggcagaacaggattcggtgcatgattttatgtgttttcgaaacggtgtctgtcacattgtgatcccctgatggctcccctctctgttgctgatcctctttgttctgtacagaagcaaattctcacctgtgtaacatcctgaagcacctggtaaaatgtgaggcaaagagaggccacttctcaaatgctgtggacggatgggctgcatcttttaaaggatatcaatatgtcttcctgttgcaattattttgactataagctcccagagagtgaaaatcaccaaccctgtgacagtggcccttaataagtgttcatgaataaatgaattgaacctgtcaagattgaagtttggatgtgatgcccactgtggtggccactcagtgctagtctgtcattctggagacccagaaagctcgttatcttctgtcccccttgtgtatcctgcctttgtgggcgaggcattcaaaaccctgaggtttttagatctccctctacaggaagtacccagagagctgctgggggtgttattaccctgtctctgccaggcttaaagtatcctcccaaattcagcacgcaaaggtcacacaccacccccatcttaagagtaggttttctcttttgtttcaaatcttgaagatttccagaaaataataatactagccaatgtttgtggagagcttactttgctcctagattcttcattatatgttttgacccatttaatttccacaacagtctgatgaggcaggcacccccattttcagatgaggagactgaggttcgggtagaaattaagtgactcaggtttgccttcagtctctgaccaagggtttgaaaagccaggagccagcctgagaactgtggctccagagggtgttctttcagccactccgctctatgcttctcactctgggtgggcacaaccatgttctcctttggtgatgcctctaacttaccgtgaaaatgtacctttcccttcgctattggcttcccttccctcctagtcagccgagattcttttgaaaactttcctccgcttgcctgcacaaaaggcgatggaaattcaggaactgaaacatctgctctggggaatgcgtatttccacatttccaccgcctgtgtctgctgtcttatcttgaagacaggtgctccagggcttccgaggttattttgtctgttaatggacaccttgcaaagtaccacttaaggaatgagaattacaaacttttaattatattgtagggggaaaaaagtaggctgttttcctgataggtctagccattcattcagtaaaccatattgatatga

SEQ ID NO: 1196 - DNA, 8593 bp, Homo sapiens
atgattctgcagcttcagaccctgatgctgaaaccactgccaggaccaatgggaaaggaaatccaggtgagcagtcgccgagccctgagcagttcataaacaacgcaggagcaggggactccagccgctcaactcttcagaggtactcgaagctgattcatattttcactgcattttgcctttatattaatctagacgccaatttcagggatcttttttttttcttgccttagaaacagaactggcaggagtaaagtctcacattttaatcccagccttctactttatctttatataaatgctacctcctgaatctttttcactgcattcttactgagttaatgtgagaatatattaataggagagtttaattttcatttctcgttccattcttctccctcctacatataagtttgttatgaggaattagctttacaaatactatcttttgattcagagagtatgatttttcccccttttccgactgctgaagcttataataccctgtccggaagtgacagtgccacacatagtgctctgatactgagtaggtgcaaaggaaaaagcagtacttggtgtttattctaaagctgaatgtggctgttccttctttttattttatttttctgctccttcttctaaggcatgggcctccttattccaaggattacatggactttagtccgtgtagtactttctaactaatattaactgttgattatagggcagtactgattttcagcagatgtccatccctttgactgataaaatagttctggagaaattagttctaccagagaaagaattgctatcatcatcccaccattattattattcttttagctttatattattatagttacttttgcgagaggactctaaaattgcactcaagaagagataggccaacaggacttccactgaggatgcagtttcttatcaaacagatgttcttctcctttggttcaacaaaatatgcactatatagcatagagttatagtgtttattggatttaaatgcagaatttgatttgctgttatgggaaaggagctatgctacatactaatctgtgatttagcatatgagtcttaatatttcctaagaaagtaaccatcttcttattccagtaaggatatttcactgcttgccattttgttcataacacctagtcttgttattactttgattcatgtttttaccacattttccctataatattaagatggtgaccagtttcagtgattgaatgaccttagaattagaactgttagtggtagtggttagcttcctcattttaatcccagctcttcctctgcctcattctatgaatgccaccaaatctaaagcctcgtcaacctcaatgttgtaacctataaaactggagtaagtacagagagctatgtaagtattaagactcaataccatagcagatatgtcactgactacgtatatgaaatatataaagcattattgttactttatattacttacacgtagaaagaaatgtctttcctttttcctgtcctaccaaccatattcttccctctttcgctctactggattcacagttcccctctttctccctctgatgctgcccttgtggctagaggcagcatgtgcccttcagtccctaccccctcagccatgtaatgcactgacacgcattgtctgaaggtgagtgtggacatgtgggtctcctctgtggggtccagtgtagtagaagagaaaatccacaggatcctgcattcagaggcagaactgagacaccacgtccattttcctttgcctttgaagcgtcctttgaaaagacattgagcactcacctcactattctgaagagacacgttcgacctttaagccaccaacctctgactagtttctgctgacctactttttcacttgcagtgtcatcagtggtgttggggaactggatctagacaaagggccagtgaagaaagcagagccccataccaaagacaaaccttatcctgactgccccttcctgctgctagatgtgcgtgatagagattcttaccagcagtgccacattgttggaggtaagagagagaaggctttaaagtgcctcactctcaagaacagagagcctgctcttgagtctaggcaggctggaaccacagcccatggtagacagttgaggaaaccgtatgttagctggatccattatggaatcctatagggttggctccaccataaaatactcttgagaggctgctgattttcacagatggctgtcagaagcagggaagtgaagcttcatgctttgttcatagtgctctttcttttctttcacagaagtgtttaggtttatggcttgttgatttttttttttgttttttttttgttaataccttgctctgttgccaagactgaagtgtagtggcgcgatcacagctcactgcagccttgccttcctgggctcaagtgatcctcctacctcagcctctcgagtacctgggactacaggcatatgccacaacacccggctaatgtttttgtattttttatagagatgaggcctcaccatgttgcccgggctggtctcaaactcctggactcaagcggtccacccaccttggcctcccaaagtgctgggattataggtgttagccaccatgcccagcagctcatggattttgaagatgtatttaactcttagattttaaaccagctgggaattgaggccaagttgtattaagagaacaacagacttcctaaactttttcttctctttgcagcttacagttacccaattgcaactctgtctagaacaatgaacccttattcaaatgatattcttgaatatgtatcctttgttgcattttaaggaattgggtggtatgaggattgtaagaatcaaagttatcatgaaccacgctcctggtaagaatgctgtgaaggacctttgatattatttggctgagcatattttagaatttggattcctagctattgccaagaatcctgactctttaggcggatgctttcaaaccgtcttgccctgggccaaaaaacactaggttaagagttaggatccattgagagttagtcctaagagagtttttttcctcccagaaaactttccatagcagaacttagggtttttttctattttaattttttcctttaaaattttaattttttcattgataaaaattatacaagcagaaaataatttaaataccaaaaattattaaaaggaaaattgaaatatcttataatcacacagttgagcagtggcttctattacattattagtatattttattccagactgtcttctgtgtgtttgtttttttttaacaaagttgaaaccttactatatatgtaatttagtatcctgctttttttcagttcatatcccgatgtatttccccatgctgatgcaagccttctgtaaaccacatttttgatgctgtgtaatatcttcagatttactatgatttactaaaatattcctttattttggactttttagatggctcccacatttttactgtcataaataggcttcagtggacacattaggcatagaagttgttctatttcttcatctgtaaaatggggattgtaatatttactttccagggtcatagggataagagagctaaaggatgtaaagtccggaactagtgctgtcttttagatcatggtaacatcagtttgcaaaagaaacgaataccagcttgtgtggtttccatgatgggaaaccatccagtccctgctggtgtgacggtaggaatgggcttgtccatcgttcccgggaactcagacaggtggacctgaccttttattccttgggggtttctcgtagtcttgggacatcagcccagtgccttggaaccttaactcatctgactcttagaaaaatgcccatggcaagatcatcattctgtatgacgatgatgaaaggctggccagtcaggcggccaccaccatgtgcgagcgtggatttgaaaacctcttcatgctttccggaggtgagcaaggtgatactctgcttgggacttcaaaggctgatcatccttcagtcccacctgcatccccttttctctcttggtgctcagaattcagtgttctggaaagagaaaaagccatgctggctgaaaggagtcaggagttatgtgaaacttcccttagcttcatcagcacatgtttttaattcctgatgttgcttcagggctctgtcacaaagccctaatgctgaagactcgagcaaaaggatttcttgtggaattctcagaatcccatgtaacaacagatattttctggtataatttgcttaatgatgaaatagttaagaaagatttcatgtccttgtgttggcctcaacttgatgaccagagattagaagacatgcaggcttctttccaggttttggcctggccttgccatattaatgcagctttttctgatgattttccaaacctaggtctaaaagtcttagctcagaaattcccggaaggactgattactggttccctgccagcatcttgccagcaggcccttcctcctgggtctgcccggaaacgatccagccccaaagggccacccctaccagctgagaataaatggagatttaccccagaagacttaaaaaagatagaatattatctggaagaggagcaagggcctgcagatcatcctagtaagatcttttgacctttaaagataatgtttggtttgcagctttgaatatcacctcatcatatgaaaaccttcatctcttatatttagattcttaaaatactagggaggtatgttacaggtgctggggaggggaggcagtggaggtgaccccagatagtggcaagaattacgcattgaagagagactttatcaaaacatagcgactttttttttttttgagacagagtcttgctctgtcacccaggctggaatgcaatgggatgatcttggctcactgcaacctccgtctccccggttcaagcgattctcccacatcagcctcccgagtaggtgggattacaggtgcccgccaccacaccaggctaatttttttgtattttaagtagagacagggtttcaccatgttggccaggctggtctcgaacttctggccacaagtgatccacccacctcagccttccaaagtgctaggattacaggcatgagccaccacgcccaggcaaaaatgtagagacttcatcaaaaagtatatctcaggtaaaattgaggagttaagcatcagaccttcagattccttcttggaaagttttcgattccttctgcagcttttgcttctccactctgagagcctctgtggtttgtcttcctaccttagtttcaccgtactgctttctcttttctttccccaaatcactcctcgtctgcatcctctctaccaaggaagtagtggaggacagactaggtttgttggggatgttggagaggaagggaaaaaaaacctatctgggtttcccttcatttctgtccccctccccaccttcaggctgatctcaaggatgaggagtaggccatcgttggcctaaagtagatactgcataggacttcattagcttaaaagtggttgtaggctaggacttcattagcttaaaactgtacttggcagattgtccctggaatcattcttgcagctctgttccttctttcttgctcccttcaggccgactgaaccaagctaactcctccggaagagagtccaaggtgcctggtgcccgaagcgctcagaatctgccaggtggcggccccgccagccactcaaacccccgctccctcagcagtggtcacctgcaaggcaaaccctggaagtaaagactttgtctcacttaggcaaataaatgttcttcctcttttcagaacccctgagcatttcccaagttgggtcatttccagaaacttctgcagaggaaagaccatgacatatgtatgggataggcctcttccctgtccctgtctccagttcctctcccctcaggaggccacctcaggaaggattttgacaggtgaccataaaaaccagaggtgtgacaggctctagtctcctccctgttgtttacagcatatttaagtcttgtgaaactgtataggaaaaaagtatctacgtttttagtttttttgttttgtttttttttaataaggtccagcttgttgggtctctctgtgttgttttgtaaatacttcagtcacatctgcccgtgtgcctgtccctgccaccttttcattcactgttcttgacttcatgaaggcttctccgggcagtcttggtgtgagaagctgtttccaagggtgcagatgagccttaggttccagccgcctgcagaccccaccccagcaggctcactcagcaaggagctctctgcccagcatattgcaggccctgttttgagtatggaagccagtgcctgtgtactcactgaaattgaagatgaggaaagtagctgtacactcactgaatgctcccccttactagatatttcctggagccagaaaggtatgcatgtgggtgtcttcacaccggggaggagggcctctcatgggaaagccctggccaccacaccggcctgtgccccttgaagcccaccaaagcggccctcacttgtggtcagtatatcagttatgacgcccattgcccagcttcagtccatccatgttagatggacagaaattatggccagttgaaaataccagctttggttggacaactgtggacacacaaggtgaagaggactccgaagtcctttgtcagggctgacaacctcgtaagcccttgcttagaaatacagtattagtctaattgagtaattagtgcaatttcctgcttacttttcattctcatgactgaactgtgattaggaagttgtgattatagattctggttttggccggaattttgaatcagcattaattgaattgctaaatgactgacattcattccatttaattgggggaacaaaaggcctcaggtaaggatgaggaactctgaaatcagatggaaaagagcggtgttaatttttatggtctgtgatcgtagctgtgataagggactgaggaataaattgtgctctttgtcatggcaaccagcttctgaaaagcccactgaaaattgcctgtcctgctggtaactgctacggggtaagatttgccttaacagtactattttctcgccaccaaaaaaaaaaaaaaaaaaaaaaaaaaatgcaccacagtatttctagcatgggggctgtgtttgtatgagaaataaacgtaataaatatctcatagagacatatggaaaaataactttcagattcagcccagttctgttttagagtgtgtttattcttctctacttgatttccaaagtgcaacattttccgatgctttagaaatcaaacaaaccagggacattgttcagatgtcaagccatgcccaattttccacaagattcaagaatcttgtataaaattcagccaacgtacacatagctttaatgaggagcctgtcatgtttccccataaatttattgcctgagaacttagttcagcctttgctaatgccaaaatgctctggctttgtattttctttacagcatagatagaaaaatgcacatttttccacactcagctttcccctagcatggacaagattttcagccatttttgccacatatacatttttaaggaaaaaagatttttctctgtaagaaagttctggttatgctgttttaaaggtgacttgtcaggagttgagacttccctgccggattctattttgaaagtaaatggtcttccctccttgttccgattctgcgttcccatcgtcagacaactttggagtattagaaaccactgtatatatgtggaaagccaggtcagccagacctgttagaattggtgtgcactcacctgagagatctggcaggttggatatatttatgtgtatttctccacagtgcttgctttgccctgttggtaaggattttaaataaccatgctcaaaagagctgttctaatctgcgttttgcatgttaagtgttaatatcaaacattctttacgtgctcgaggtattgcttttaacattctactttgccagtttcttcattagattaattgacatgtattatttaaatgaccagtgatgctttgtgcaattatgaatgttgaagattaaagtacatagttactaatttgtcgtttgctattaatatgctgaaaactgccaacttctctcttcttttctgtcgagatgatttgggggagccacaggagactggtgtgatttttgctgcatctcctaggaaagcattttttaaaaaaaataaatgaatcaggaaatcagtccaattagggcagggggcctcagctctccagtcagaaagcctggatttcttttcctgctcaggctgggactgaagccaccttcaacaactggatcatggcttcctaccagcgtctcaggggttgactagctgcccttgtctggggcttgtgaaccctgagacagaaggtgcttcatcgatgtacaactacagcaccctgaacagcagtgatggccaaagtttaaataataccttaaatgctttaaaggggtttgtgtttaaggaaggg

SEQ ID NO: 1197 - DNA, 2332 bp, Homo sapiens
gaaggactaccatcttgctttactattcaaggtacttccctgtcttgccacacatcctgtgttcgggatgaaaacgttgcatcgtgctgcatctcatgcacgtcatcttggccactgcccggctcgattccagctctcgctgacttgagctttctcaggaccctgagcagggctgagtggccactttgatcaaacacctcagcaaggacgagagtgttgatgaaatattttgcagaacaacacctgagtgctgagggaggctgctagatgtgcgcataaacacttcaccacacagcacctggtttggcagcactgccagggcatgccatggagagatccagcactgaccccagagcctctggtcccgtttacctgcgttcctcctaagagtctgccagtcttcatccacaaaattaatttttctgtcgtcacttctcatattaaatataattctggatccttaggtatgtgagcatggccagctcccttggagcaagcaggagccttgggggctgaggccgtgtgtccccctctcctgtcctatgcagggagcccaagctgattcagggatgaatggcgggtggagggaaccctgtgtaacaaagtgagccaggaacaggaggacaggacaaaggaatggctgggaccagaggacagaaagtccccagtggtttcttctgtggccttgtagattccggggcagtgcagggtggtgtcagcagctggctcctctgactcagtaccagattcggcactggagggcagacctggggccaccgtctcctgccctacctgagcaggagttccatgggaaacctctatgtagaatcggctgcggctgcccttgtgttggtcattctcatccaagttatctcccatgtacctctgaggtggggcccagggtccacatcaacaagcagctgacgacccctcaagcaccatcactagagtgtggctggtggtggggccccctcctaaccatctcccacctccccacaggactcaggacacccctgcacggcggccgaccctgacagctgcttcacgcctgtgtctccgcagcacttcatcgacctcttcaagttttaagggctgcccctgccatccctattggagattgtgaatcctgctgtctgtgcagggctcatagtgagtgttctgtgaggtgggtggagactcctcggaagcccctgcttccagaaagcctgggaagaactgcccttctgcaaaggggggactgcatggttgcattttcatcactgaaagtcagaggccaaggaaatcatttctacttctttaaaaactccttctaagcatattaaaatgtgaaattttgcgtactctctctctctatatatatagttcaaaaatactttaggtggtcagctccacattctttgttgacgtgacactaacggccaataatatgcttcttaattatcaaattatagtttcccaattgggaaactaattgggggtgggttacaaaacatttgatccttgtaaatacattgtacagaatatttattttttctcaaaatgcattttaactactacattggctgtgcccaaatgagtcctctttgaatagaaagtgaacccagggcaatgacagccattcttgtcttagggattatggatcggggtatgaagtgtgcacacgcagcccaacaacgggcagtggtctctgtgctcctaggcatccagcacaggttctggcagggcacccctgctggggttgggggctggtctgtgcataatcctggactgtgatgggaacagcccagtgcagtctaaacttcaattgtgttgaaactactttaatagacaaagtaataaatcatgtttatctattgatttaaacttcatcagttttgcatcctactgagaaatgttagtgattttgatacttaaatccttaaaagattgcttcgtttttaaaataacgcatgtccattttagaaaattagaaaatcagtcccaccacccaaagattattgtgcatgctgaaaagagtatgaaaaatcccctcagcaggcataggatagaaacgtattgttgtatatttccatttttgaatagggtcaaggagcccaagcaaatcatttctactttttcctttaagcataataataaaagtatacttttatggcgttataaataggactaaaaaaagattctggatttttcagccccacttctgtgaactgacacaaatggccaagaatgcatttatttgtcaaattatagtttctcctgaggcgatgcaaatacctggggcctctgcgaatatatgttagtttttcataagaccataaatgtcccgtatacc

SEQ ID NO: 1198 - DNA, 669 bp, Homo sapiens
ttgtgagcttgaatatttccatatatttattatccatttgcttttcttgtttttggtaaattacttaatgtggtatttgcctgttttttggggtggatgtcagtcttttttcatgttagtttcttcttaaaaggaaactatccttttgaagttgtggttctttcccctaatttgtcatatactgttactgtcatttaattgttagatgttataacagttctcagctgtgctatcaaatcacagatgtgcatttaacttgtataaattgagcagtacttgcttggaaaacataaccatattaatagtgtaggattccagctgttctgctgggctggcatatttccacaggccatggacacagctagccgcattgccactgcatgggtcacagcctcctgcaggtgcgttcgagggacaagctgtgggagctgggcaggtaagcagggatggcttacattgctggggagagattgaaaggttaatggagggtataaggacagaataaagacaattttgaggcactgatcagttatttacagaagatcggacaacaccaaacagagatgagaagagaaatcatagatctccactttggaatggtatttttgaatacagtttctatcagggggccttccaaaagtagggatgccactcctgtgagattaagtt

What is claimed is:

1. An isolated nucleic acid molecule comprising a polynucleotide having a nucleotide sequence at least 95% identical to a sequence selected from the group consisting of:
(a) a polynucleotide fragment of SEQ ID NO:X or a polynucleotide fragment of the cDNA sequence contained in Clone ID NO:Z, which is hybridizable to SEQ ID NO:X;
(b) a polynucleotide encoding a polypeptide fragment of SEQ ID NO:Y or a polypeptide fragment encoded by the cDNA sequence contained in cDNA Clone ID NO:Z, which is hybridizable to SEQ ID NO:X;
(c) a polynucleotide encoding a polypeptide fragment of a polypeptide encoded by SEQ ID NO:X or a polypeptide fragment encoded by the cDNA sequence contained in cDNA Clone ID NO:Z, which is hybridizable to SEQ ID NO:X;
(d) a polynucleotide encoding a polypeptide domain of SEQ ID NO:Y or a polypeptide domain encoded by the cDNA sequence contained in cDNA Clone ID NO:Z, which is hybridizable to SEQ ID NO:X;
(e) a polynucleotide encoding a polypeptide epitope of SEQ ID NO:Y or a polypeptide epitope encoded by the cDNA sequence contained in cDNA Clone ID NO:Z, which is hybridizable to SEQ ID NO:X;
(f) a polynucleotide encoding a polypeptide of SEQ ID NO:Y or the cDNA sequence contained in cDNA Clone ID NO:Z, which is hybridizable to SEQ ID NO:X, having biological activity;
(g) a polynucleotide which is a variant of SEQ ID NO :X;
(h) a polynucleotide which is an allelic variant of SEQ ID NO:X;
(i) a polynucleotide which encodes a species homologue of the SEQ ID NO:Y;
(j) a polynucleotide capable of hybridizing under stringent conditions to any one of the polynucleotides specified in (a)-(i), wherein said polynucleotide does not hybridize under stringent conditions to a nucleic acid molecule having a nucleotide sequence of only A residues or of only T residues.

2. The isolated nucleic acid molecule of claim 1, wherein the polynucleotide fragment comprises a nucleotide sequence encoding a protein.

3. The isolated nucleic acid molecule of claim 1, wherein the polynucleotide fragment comprises a nucleotide sequence encoding the sequence identified as SEQ ID NO:Y or the polypeptide encoded by the cDNA sequence contained in cDNA Clone ID NO:Z, which is hybridizable to SEQ ID NO:X.

4. The isolated nucleic acid molecule of claim 1, wherein the polynucleotide fragment comprises the entire nucleotide sequence of SEQ ID NO:X or the cDNA sequence contained in cDNA Clone ID NO:Z, which is hybridizable to SEQ ID NO:X.

5. The isolated nucleic acid molecule of claim 2, wherein the nucleotide sequence comprises sequential nucleotide deletions from either the C-terminus or the N-terminus.

6. The isolated nucleic acid molecule of claim 3, wherein the nucleotide sequence comprises sequential nucleotide deletions from either the C-terminus or the N-terminus.

7. A recombinant vector comprising the isolated nucleic acid molecule of claim 1.

8. A method of making a recombinant host cell comprising the isolated nucleic acid molecule of claim 1.

9. A recombinant host cell produced by the method of claim 8.

10. The recombinant host cell of claim 9 comprising vector sequences.

11. An isolated polypeptide comprising an amino acid sequence at least 90% identical to a sequence selected from the group consisting of:
(a) a polypeptide fragment of SEQ ID NO:Y or the encoded sequence contained in cDNA Clone ID NO:Z;
(b) a polypeptide fragment of SEQ ID NO:Y or the encoded sequence contained in cDNA Clone ID NO:Z, having biological activity;
(c) a polypeptide domain of SEQ ID NO:Y or the encoded sequence contained in cDNA Clone ID NO:Z;
(d) a polypeptide epitope of SEQ ID NO:Y or the encoded sequence contained in cDNA Clone ID NO:Z;
(e) a full length protein of SEQ ID NO:Y or the encoded sequence contained in cDNA Clone ID NO:Z;
(f) a variant of SEQ ID NO:Y;
(g) an allelic variant of SEQ ID NO:Y; or
(h) a species homologue of the SEQ ID NO:Y.

12. The isolated polypeptide of claim 11, wherein the full length protein comprises sequential amino acid deletions from either the C-terminus or the N-terminus.

13. An isolated antibody that binds specifically to the isolated polypeptide of claim 11.

14. A recombinant host cell that expresses the isolated polypeptide of claim 11.

15. A method of making an isolated polypeptide comprising:
(a) culturing the recombinant host cell of claim 14 under conditions such that said polypeptide is expressed; and
(b) recovering said polypeptide.

16. The polypeptide produced by claim 15.

17. A method for preventing, treating, or ameliorating a medical condition, comprising administering to a mammalian subject a therapeutically effective amount of the polynucleotide of claim 1.

18. A method of diagnosing a pathological condition or a susceptibility to a pathological condition in a subject comprising:
(a) determining the presence or absence of a mutation in the polynucleotide of claim 1; and
(b) diagnosing a pathological condition or a susceptibility to a pathological condition based on the presence or absence of said mutation.

19. A method of diagnosing a pathological condition or a susceptibility to a pathological condition in a subject comprising:
(a) determining the presence or amount of expression of the polypeptide of claim 11 in a biological sample; and
(b) diagnosing a pathological condition or a susceptibility to a pathological condition based on the presence or amount of expression of the polypeptide.

20. A method for identifying a binding partner to the polypeptide of claim 11 comprising:
(a) contacting the polypeptide of claim 11 with a binding partner; and
(b) determining whether the binding partner effects an activity of the polypeptide.

21. The gene corresponding to the cDNA sequence of SEQ ID NO:Y.

22. A method of identifying an activity in a biological assay, wherein the method comprises:
(a) expressing SEQ ID NO:X in a cell;
(b) isolating the supernatant;
(c) detecting an activity in a biological assay; and
(d) identifying the protein in the supernatant having the activity.

23. The product produced by the method of claim 20.

24. A method for preventing, treating, or ameliorating a medical condition, comprising administering to a mammalian subject a therapeutically effective amount of the polypeptide of claim 11.
